(19) United States
(12) Patent Application Publication
(10) Pub. No.: US 2024/0309058 A1
(43) Pub. Date: Sep. 19, 2024

(54) TUMOR HOMING AND CELL PENETRATING PEPTIDE-IMMUNO-ONCOLOGY AGENT COMPLEXES AND METHODS OF USE THEREOF

(71) Applicant: Blaze Bioscience, Inc., Seattle, WA (US)

(72) Inventors: Natalie Winblade NAIRN, Seattle, WA (US); Julia NOVAK, Sequim, WA (US); Kenneth GRABSTEIN, Mercer Island, WA (US); Dennis MILLER, Woodinville, WA (US); Greg T. HERMANSON, Loves Park, IL (US); Scott R. PRESNELL, Tacoma, WA (US); Mark STROUD, Seattle, WA (US)

(21) Appl. No.: 18/518,088

(22) Filed: Nov. 22, 2023

Related U.S. Application Data
(63) Continuation of application No. 16/954,190, filed on Jun. 15, 2020, now Pat. No. 11,866,466.
(60) Provisional application No. 62/607,893, filed on Dec. 19, 2017.
(60) Provisional application No. 62/622,711, filed on Jan. 26, 2018.

(51) Int. Cl. C07K 14/435; A61K 45/06; A61K 47/64; A61K 47/65; A61P 35/00; C07K 19/00

(52) U.S. Cl. CPC C07K 14/43522; A61K 45/06; A61K 47/64; A61K 47/65; A61P 35/00; C07K 19/00

(57) ABSTRACT

Peptide-immuno-oncology agent complexes (“peptide-I/O complexes”) that can home, target, migrate to, are directed to, are retained by, accumulate in, penetrate, or bind to the tumor microenvironment, tumor tissues, or cells or compartments or cytosol of cells thereof, or any combination thereof, are disclosed. Additionally disclosed are peptide-I/O complexes that can cross the blood-brain barrier. Pharmaceutical compositions and uses for peptide-I/O complexes comprising such peptides are also disclosed. Such compositions can be formulated for targeted delivery of an immuno-oncology agent (“I/O”) to the tumor microenvironment. Targeted compositions of the disclosure can deliver peptide-I/O complexes to target regions, tissues, structures or cells targeted by the peptide.

### CROSS-REFERENCE

[0001] This application is a U.S. Continuation of Application No. 16/954,190, filed Jun. 15, 2020, which is a 371 U.S. National Stage entry of International Application No. PCT/US2018/066337, filed Dec. 18, 2018, which claims the benefit of U.S. Provisional Application No. 62/607,893 filed Dec. 19, 2017, and U.S. Provisional Application No. 62/622,711 filed Jan. 26, 2018, all of which are incorporated herein by reference in their entireties for all purposes.

### SEQUENCE LISTING

[0002] The instant application contains a Sequence Listing which has been submitted electronically in ASCII format and is hereby incorporated by reference in its entirety. Said ASCII copy, created on Dec. 18, 2018, is named 45639-715_601_SL.txt and is 1,042,425 bytes in size.

### BACKGROUND

[0003] Cancer therapy has faced numerous challenges with respect to the specificity and selectivity of a given treatment for eradicating tumor cells. In particular, drugs that can stimulate host immune activity against cancer cells suffer from a lack of specificity when systemically delivered, which can lead to off-target effects against healthy cells. In addition, other drugs that can stimulate host immune activity may not efficiently reach their site of action (such as in the cell cytoplasm, or across the blood brain barrier). Thus, a significant problem that remains in the field is targeted delivery of immuno-oncology agents to the tumor microenvironment, uptake of immuno-oncology agents in appropriate intracellular compartments in tumor cells, and delivery of immuno-oncology agents to inaccessible tumor sites, such as the brain. Herein, we provide peptides with tumor homing, cell penetration, and/or blood-brain barrier traversing properties, which can be coupled to immuno-oncology agents for cancer therapy.

### SUMMARY

[0004] In various aspects, the present disclosure provides a composition comprising a peptide-immuno-oncology agent complex (peptide-I/O complex), wherein the peptide of the peptide-I/O complex is tumor-homing; and wherein the immuno-oncology agent (I/O) of the peptide-I/O complex is an IL-15 agent, a RIG-I ligand, a 4-1BB ligand, a STING ligand, an MDA5 ligand, a CGAS ligand, a TLR3 ligand, a TLR7/8 ligand, or a TLR9 ligand.

[0005] In various aspects, the present disclosure provides a composition comprising a peptide-immuno-oncology agent complex (peptide-I/O complex), wherein the peptide of the peptide-I/O complex is cell penetrating; and wherein the immuno-oncology agent (I/O) of the peptide-I/O complex is an IL-15 agent, a RIG-I ligand, a 4-1BB ligand, a STING ligand, an MDA5 ligand, a CGAS ligand, a TLR3 ligand, a TLR7/8 ligand, or a TLR9 ligand.

[0006] In various aspects, the present disclosure provides a composition comprising a peptide-immuno-oncology agent complex (peptide-I/O complex), wherein the peptide of the peptide-I/O complex is blood brain barrier (BBB) penetrating; and wherein the immuno-oncology agent (I/O) of the peptide-I/O complex is an IL-15 agent, a RIG-I ligand, a 4-1BB ligand, a STING ligand, an MDA5 ligand, a CGAS ligand, a TLR3 ligand, a TLR7/8 ligand, or a TLR9 ligand. In some aspects, the I/O comprises an agonist of a receptor, wherein the receptor comprises IL-15R, RIG-I, 4-1BB, STING, MDA5, CGAS, TLR3, TLR7/8, or TLR9.

[0007] In various aspects, the present disclosure provides a composition comprising a peptide-immuno-oncology agent complex (peptide-I/O complex), the peptide-I/O complex comprising a) a peptide, wherein the peptide of the peptide-I/O complex is a tumor-homing peptide comprising a sequence that has at least 70%, at least 75%, at least 80%, at least 85%, at least 90%, at least 91%, at least 92%, at least 93%, at least 94%, at least 95%, at least 96%, at least 97%, at least 98%, at least 99%, or at least 100% sequence identity with any one of SEQ ID NO: 1-SEQ ID NO: 567, SEQ ID NO: 1243-SEQ ID NO: 1252, SEQ ID NO: 1263-SEQ ID NO: 1289, wherein upon administration to a subject the peptide homes, targets, migrates to, accumulates in, binds to, is retained by, is processed by, or is directed to a tumor of the subject; and b) an immuno-oncology agent (I/O), wherein the I/O of the peptide-I/O complex stimulates a host immune response against the tumor.

[0008] In various aspects, the present disclosure provides a composition comprising a peptide-immuno-oncology agent complex (peptide-I/O complex), the peptide-I/O complex comprising a) a peptide, wherein the peptide of the peptide-I/O complex is a tumor-homing peptide comprising a sequence that has at least 70%, at least 75%, at least 80%, at least 85%, at least 90%, at least 91%, at least 92%, at least 93%, at least 94%, at least 95%, at least 96%, at least 97%, at least 98%, at least 99%, or at least 100% sequence identity with any one of SEQ ID NO: 568-SEQ ID NO: 1134, SEQ ID NO: 1253-SEQ ID NO: 1262. SEQ ID NO: 1290-SEQ ID NO: 1316, wherein upon administration to a subject the peptide homes, targets, migrates to, accumulates in, binds to, is retained by, is processed by, or is directed to a tumor of the subject; and b) an immuno-oncology agent (I/O), wherein the I/O of the peptide-I/O complex stimulates a host immune response against the tumor.

[0009] In various aspects, the present disclosure provides a composition comprising a peptide-immuno-oncology agent complex (peptide-I/O complex), the peptide-I/O complex comprising a) a peptide, wherein the peptide of the peptide-I/O complex is a cell penetrating peptide comprising a sequence that has at least 70%, at least 75%, at least 80%, at least 85%, at least 90%, at least 91%, at least 92%, at least 93%, at least 94%, at least 95%, at least 96%, at least 97%, at least 98%, at least 98%, or at least 100% sequence identity with any one of SEQ ID NO: 1-SEQ ID NO: 567, SEQ ID NO: 1243-SEQ ID NO: 1252, or SEQ ID NO: 1263-SEQ ID NO: 1289, is cell penetrating; and b) an immuno-oncology agent (I/O), wherein the I/O of the peptide-I/O complex stimulates a host immune response against the tumor.

[0010] In various aspects, the present disclosure provides a composition comprising a peptide-immuno-oncology agent complex (peptide-I/O complex), the peptide-I/O complex comprising: a) a peptide, wherein the peptide of the peptide-I/O complex is a cell penetrating peptide comprising a sequence that has at least 70%, at least 75%, at least 80%, at least 85%, at least 90%, at least 91%, at least 92%, at least 93%, at least 94%, at least 95%, at least 96%, at least 97%, at least 98%, at least 98%, or at least 100% sequence identity with any one of SEQ ID NO: 568-SEQ ID NO: 1134, SEQ ID NO: 1253-SEQ ID NO: 1262, or SEQ ID NO: 1290-SEQ ID NO: 1316, wherein upon administration to a subject the peptide is cell penetrating; and b) an immuno-oncology agent (I/O), wherein the I/O of the peptide-I/O complex stimulates a host immune response against the tumor.

[0011] In various aspects, the present disclosure provides a composition comprising a peptide-immuno-oncology agent complex (peptide-I/O complex), the peptide-I/O complex comprising: a) a peptide, wherein the peptide of the peptide-I/O complex is a blood brain barrier (BBB) penetrating peptide comprising a sequence that has at least 70%, at least 75%, at least 80%, at least 85%, at least 90%, at least 91%, at least 92%, at least 93%, at least 94%, at least 95%, at least 96%, at least 97%, at least 98%, at least 98%, or at least 100% sequence identity with any one of SEQ ID NO: 1-SEQ ID NO: 567, SEQ ID NO: 1243-SEQ ID NO: 1252, or SEQ ID NO: 1263-SEQ ID NO: 1289, wherein upon administration to a subject the peptide is blood brain barrier (BBB) penetrating; and b) an immuno-oncology agent (I/O), wherein the I/O of the peptide-I/O complex stimulates a host immune response against the tumor.

[0012] In various aspects, the present disclosure provides a composition comprising a peptide-immuno-oncology agent complex (peptide-I/O complex), the peptide-I/O complex comprising a) a peptide, wherein the peptide of the peptide-I/O complex is a blood brain barrier (BBB) penetrating peptide comprising a sequence that has at least 70%, at least 75%, at least 80%, at least 85%, at least 90%, at least 91%, at least 92%, at least 93%, at least 94%, at least 95%, at least 96%, at least 97%, at least 98%, at least 98%, or at least 100% sequence identity with any one of SEQ ID NO: 568-SEQ ID NO: 1134, SEQ ID NO: 1253-SEQ ID NO: 1262, or SEQ ID NO: 1290-SEQ ID NO: 1316, wherein upon administration to a subject the peptide is blood brain barrier (BBB) penetrating; and b) an immuno-oncology agent (I/O), wherein the I/O of the peptide-I/O complex stimulates a host immune response against the tumor.

[0013] In some aspects, the I/O comprises an IL-15 agent, a RIG-I ligand, a 4-1BB ligand, a STING ligand, an MDA5 ligand, a CGAS ligand, a TLR3 ligand, a TLR7/8 ligand, or a TLR9 ligand.

[0014] In some aspects, the I/O comprises an agonist of a receptor or target, wherein the receptor or target comprises IL-15R, RIG-I, 4-1BB, STING, MDA5, CGAS, TLR, TLR7/8, or TLR9.

[0015] In some aspects, the peptide comprises tumor homing properties. In some aspects, the peptide comprises a cell penetrating property. In some aspects, the cell penetrating property comprises uptake into an endosome; uptake into a subcellular compartment; uptake and processing in a subcellular compartment and secretion; uptake and delivery to cytoplasm; uptake and transcytosis; uptake and nuclear localization; uptake and extracellular presentation; pinocytosis; uptake, cleavage, and secretion into the tumor microenvironment; or uptake and presentation on a cell surface protein. In some aspects, the peptide-I/O complex targets the cytosol. In some aspects, the peptide-I/O complex is taken up, processed, and presented extracellularly.

[0016] In some aspects, the peptide-I/O complex enters, accumulates in, or is processed in a cellular compartment, wherein the cellular compartment comprises a subcellular compartment, cytoplasm, endoplasmic reticulum, Golgi apparatus, endosome, or lysosome. In some aspects, the peptide homes to, targets, migrates to, accumulates in, binds to, is retained by, is processed by, or is directed to a tumor of the subject. In some aspects, the peptide is cleaved from the peptide-I/O complex in a tumor cell environment, within a cell, in an endosome, in a lysosome, in cytosol, in endoplasmic reticulum, or in Golgi apparatus.

[0017] In some aspects, the peptide crosses the blood brain barrier (BBB). In some aspects, the peptide-I/O complex, the peptide, the I/O, or any combination thereof enters the cell cytosol, a subcellular compartment, endoplasmic reticulum, Golgi apparatus, endosome, lysosome. In some aspects, the I/O stimulates immunogenic cell death (ICD). In some aspects, the peptide-I/O complex is processed by a cell or a tumor microenvironment. In some aspects, the processing of the peptide-I/O complex by the cell or tumor micronenvironment changes activity, concentration, method or location of presentation of the peptide-I/O complex.

[0018] In some aspects, the IL-15 agent comprises an IL-15 hyperagonist. In some aspects, the IL-15 agent comprises a fusion of an IL-15 domain and an IL-15Ra sushi+domain.

[0019] In some aspects, the IL-15 agent comprises the following formula: L₀-X-L₁-Y-L₂, wherein any one of X, Y, comprises SEQ ID NO: 1177 or SEQ ID NO: 1178 or SEQ ID NO: 1491, wherein any one of X, Y, comprises SEQ ID NO: 1176 or SEQ ID NO: 1179, and wherein L₀, L₁, L₂, comprises any one of SEQ ID NO: 1163-SEQ ID NO: 1172 or SEQ ID NO: 1359-SEQ ID NO: 1366 or SEQ ID NO: 1139-SEQ ID NO: 1161 or L₀, L₁, L₂, comprises Xn, wherein each X individually comprises any amino acid and n is any number from 1 to 50 or are absent.

[0020] In some aspects, the IL-15 agent comprises two moieties of SEQ ID NO: 1177 and a moiety of SEQ ID NO: 1179. In some aspects, the IL-15 agent comprises two moieties of SEQ ID NO: 1178 and a moiety of SEQ ID NO: 1179. In some aspects, the IL-15 agent is selected from TABLE 3. In some aspects, the peptide-IL-15 agent is selected from SEQ ID NO: 1317-SEQ ID NO: 1341, and SEQ ID NO: 1343-SEQ ID NO: 1348. In some aspects, the IL-15 agent is selected from L₀-X-L₁-Y-L₂, wherein L₁ can be SEQ ID NO: 1169 or SEQ ID NO: 1163, X can be SEQ ID NO: 1176 or SEQ ID NO: 1179, and Y can be SEQ ID NO: 1177, SEQ ID NO: 1178, in any combination. In some aspects, the peptide-I/O complex is selected from TABLE 4.

[0021] In some aspects, the RIG-I ligand comprises a double stranded RNA (dsRNA). In some aspects, the RIG-I ligand comprises hairpin RNA. In some aspects, the MDA5 ligand comprises a double stranded RNA (dsRNA). In some aspects, the MDA5 ligand comprises hairpin RNA. In some aspects, the dsRNA comprises 10-60 base pairs. In some aspects, the dsRNA comprises 11-18 base pairs. In some aspects, the dsRNA comprises 7-10 base pairs. In some aspects, the dsRNA comprises a hairpin RNA. In some aspects, the hairpin RNA comprises 14-120 base pairs. In some aspects, the hairpin RNA comprises 7-60 base pairs. In some aspects, at least one base pair in the single hairpin RNA comprises a first base paired with a second base within the hairpin RNA. In some aspects, the hairpin RNA comprises a 5′ triphosphate. In some aspects, the hairpin RNA is a single hairpin RNA. In some aspects, the RIG-I ligand comprises a 5′ triphosphate. In some aspects, the RIG-I ligand comprises a 5′ diphosphate. In some aspects, the RIG-I ligand comprises an uncapped 5′A or G. In some aspects, the RIG-I ligand comprises a 5′ triphosphate on a blunt end. In some aspects, the RIG-I ligand comprises a panhandle region in a negative-strand RNA virus.

[0022] In some aspects, the RIG-I ligand comprises a benzobisthiazole compound. In some aspects, an RNA backbone of the RIG-I ligand comprises a modification for increased in vivo stability compared to an unmodified RNA backbone of the RIG-I ligand. In some aspects, the modification comprises a 2′-fluoro-modification, a phosphorothioate-substitution, a methyl phosphonate modification, a 2′-O methyl modification, a 2′-F RNA base, a bridged nucleic acid, a morpholino nucleic acid, a PNA, an LNA, an ethyl cEt nucleic acid or any combination thereof. In some aspects, the RIG-I ligand forms its own double strand. In some aspects, the RIG-I ligand is selected from TABLE 6.

[0023] In some aspects, the RIG-I ligand is SEQ ID NO: 1180 and SEQ ID NO: 1181, SEQ ID NO: 1182 and SEQ ID NO: 1183, SEQ ID NO: 1184 and SEQ ID NO: 1185, SEQ ID NO: 1186 and SEQ ID NO: 1187, SEQ ID NO: 1189 and SEQ ID NO: 1190, SEQ ID NO: 1191 and SEQ ID NO: 1192, SEQ ID NO: 1203 and SEQ ID NO: 1204, SEQ ID NO: 1205 and SEQ ID NO: 1206, SEQ ID NO: 1235 and SEQ ID NO: 1236, SEQ ID NO: 1237 and SEQ ID NO: 1238, SEQ ID NO: 1239 and SEQ ID NO: 1240, and SEQ ID NO: 1241 and SEQ ID NO: 1242. In some aspects, SEQ ID NO: 1189, SEQ ID NO: 1191, SEQ ID NO: 1196, or SEQ ID NO: 1198 comprises a triphosphate on the 5′ end of a sense strand. In some aspects, SEQ ID NO: 1196 does not comprise a triphosphate. In some aspects, SEQ ID NO: 1180-SEQ ID NO: 1187 comprises a 5′ triphosphate group. In some aspects, the RIG-I ligand is SEQ ID NO: 1371.

[0024] In some aspects, the MDA5 ligand comprises an uncapped 5′A or G. In some aspects, the MDA5 ligand comprises a panhandle region in a negative-strand RNA virus. In some aspects, the MDA5 ligand comprises a benzobisthiazole compound. In some aspects, an RNA backbone of the MDA5 ligand comprises a modification for increased in vitro or in vivo stability compared to an unmodified RNA backbone of the MDA5 ligand.

[0025] In some aspects, the modification comprises a 2′-fluoro-modification, a phosphorothioate-substitution, a methyl phosphonate modification, a 2′-O methyl modification, a 2′-F RNA base, a bridged nucleic acid, a morpholino nucleic acid, a PNA, an LNA, an ethyl cEt nucleic acid or any combination thereof. In some aspects, the MDA5 ligand forms its own double strand. In some aspects, the MDA5 ligand is selected from TABLE 6. In some aspects, the MDA5 ligand is SEQ ID NO: 1180 and SEQ ID NO: 1181, SEQ ID NO: 1182 and SEQ ID NO: 1183, SEQ ID NO: 1184 and SEQ ID NO: 1185, SEQ ID NO: 1186 and SEQ ID NO: 1187, SEQ ID NO: 1189 and SEQ ID NO: 1190, SEQ ID NO: 1191 and SEQ ID NO: 1192, SEQ ID NO: 1203 and SEQ ID NO: 1204, SEQ ID NO: 1205 and SEQ ID NO: 1206, SEQ ID NO: 1235 and SEQ ID NO: 1236, SEQ ID NO: 1237 and SEQ ID NO: 1238, SEQ ID NO: 1239 and SEQ ID NO: 1240, and SEQ ID NO: 1241 and SEQ ID NO: 1242, and SEQ ID NO: 1193, and SEQ ID NO: 1194, and SEQ ID NO: 1195, and SEQ ID NO: 1196, and SEQ ID NO: 1197, and SEQ ID NO: 1198, and SEQ ID NO: 1200.

[0026] In some aspects, the MDA5 ligand does not comprise one or more of a 5′ triphosphate, 5′diphosphate, 5′ monophosphate, and 5′ cap of ribose 2-O-methylation. In some aspects, the MDA5 ligand can lack 5′triphosphate and can lack 5′ cap of ribose 2-O-methylation. In some aspects, the MDA5 ligand or TLR3 ligand is a double stranded RNA (dsRNA). In some aspects, the dsRNA comprises 12-6000 base pairs. In some aspects, the dsRNA comprises greater than 11 base pairs. In some aspects, the hairpin RNA comprises 12-6000 base pairs. In some aspects, the hairpin RNA comprises 12-40 base pairs. In some aspects, the MDA5 ligand is any dsRNA 12-40 bp. In some aspects, the dsRNA does not comprise a triphosphate.

[0027] In some aspects, the 4-1BB ligand comprises a natural sequence of human 4-1BB ligand (4-1BBL) peptide or a fragment thereof. In some aspects, the 4-1BB ligand comprises human or humanized monoclonal antibody, a monoclonal antibody or Fc fusion protein or wherein the antibody is an antibody fragment comprising scFv, Fab, Fc, heavy chain, light chain, single chain, or complementarity-determining region (CDR), or any combination thereof. In some aspects, the 4-1BB ligand comprises an anti-4-1BB antibody.

[0028] In some aspects, the anti-4-1BB monoclonal antibody is fused to an scFv moiety to create a bi-specific molecule. In some aspects, the 4-1BB ligand is fused to a trimerizing domain, such as a collagen C-propeptide of human collagen. In some aspects, the 4-1BB ligand comprises an anti-idotypic antibody that binds to and activates human 4-1BB and an antibody fragment comprising scFv, Fab, Fc, heavy chain, light chain, single chain, or complementarity-determining region (CDR), or any combination thereof. In some aspects, the 4-1BB ligand comprises urelumab. In some aspects, the urelumab comprises a complex of two moieities of SEQ ID NO: 1225 and two moieties of SEQ ID NO: 1226. In some aspects, the 4-1BB ligand comprises utomilumab. In some aspects, the utomilumab comprises a complex of two moieties of SEQ ID NO: 1228 and two moieties of SEQ ID NO: 1229. In some aspects, the 4-1BB ligand is selected from TABLE 5. In some aspects, the 4-1BB ligand is any one of SEQ ID NO: 1225-SEQ ID NO: 1229.

[0029] In some aspects, the STING ligand comprises a cyclic dinucleotide. In some aspects, the cyclic dinucleotide comprises 2′,3′-cGAMP. In some aspects, the STING ligand comprises a DMXAA analog. In some aspects, the STING ligand or agonist comprises 4-(2-chloro-6-fluorobenzyl)-N-(furan-2-ylmethyl)-3-oxo-3,4-dihydro-2H-benzo[b][1,4]thiazine-6-car-boxamide. In some aspects, the STING ligand comprises one adenosine nucleoside and one inosine nucleoside. In some aspects, the STING ligand comprises dispiro diketopiperzine (DSDP). In some aspects, the STING ligand comprises a synthetic analog of cGAMP. In some aspects, the STING ligand comprises a phosphothioester. In some aspects, the STING ligand is selected from TABLE 8.

[0030] In some aspects, the STING ligand acts as an agonist on its target. In some aspects, the peptide is linked to the I/O at an N-terminus, at the epsilon amine of an internal lysine residue, at the carboxylic acid of an aspartic acid or glutamic acid residue, at a cysteine residue, or a C-terminus of the peptide. In some aspects, the peptide further comprises a non-natural amino acid, and wherein the non-natural amino acid is an insertion, appendage, or substitution for another amino acid. In some aspects, the peptide and the I/O are recombinantly expressed as a fusion. In some aspects, the peptide is linked to the I/O at the non-natural amino acid by a linker.

[0031] In some aspects, a linker comprises an amide bond, an ester bond, a carbamate bond, a carbonate bond, a hydrazone bond, an oxime bond, a disulfide bond, a thioester bond, a thioether bond, a boronic ester complex, a triazole, a carbon-carbon bond, a carbon-nitrogen bond, or a natural amino acid. In some aspects, the linker has a cleavage rate that can be tuned to selectively cleave in a tumor or in a cell. In some aspects, the peptide-I/O complex comprises a spacer. In some aspects, the peptide and I/O are conjugated. In some aspects, the peptide and I/O are chemically conjugated or conjugated though recombinant fusion. In some aspects, the peptide and the I/O are linked via a cleavable linker.

[0032] In some aspects, the cleavable linker is cleaved by low pH, reducing agents, glutathione, a protease, an enzyme, or is hydrolytically labile, generating a cleaved I/O. In some aspects, the enzyme is matrix metalloproteinases, an esterase, thrombin, cathepsin, pepsinogen, gelatinase, elastase, trypsin, plasminogen activators, hyaluronidase, or glucuronidase. In some aspects, the cleavable linker is cleaved only, or preferentially, upon delivery to a tumor microenvironment, on the surface of a cell in the tumor microenvironment, on the surface of a tumor cell, within a cellular cytoplasm, or an intracellular compartment. In some aspects, the intracellular compartment comprises endoplasmic reticulum, endosome, lysosome, or Golgi apparatus.

[0033] In some aspects, the cleavable linker comprises any one of SEQ ID NO: 1139-SEQ ID NO: 1161 or SEQ ID NO: 1360-SEQ ID NO: 1363 and SEQ ID NO: 1365. In some aspects, the cleaved I/O is chemically modified as compared to the I/O. In some aspects, the cleaved I/O is not chemically modified as compared to the I/O. In some aspects, the cleaved I/O comprises a different potency or activity as compared to the I/O. In some aspects, the cleaved I/O comprises a different potency or activity as compared to the peptide-I/O complex. In some aspects, the peptide and the I/O are chemically conjugated via a stable linker. In some aspects, the stable linker comprises any one of SEQ ID NO: 1163-SEQ ID NO: 1168. In some aspects, the peptide and I/O are co-formulated.

[0034] In some aspects, the peptide and I/O are formulated in a nanoparticle. In some aspects, the I/O is formulated in a nanoparticleand wherein the peptide is bound externally to the nanoparticle. In some aspects, the I/O is encoded for in a vector and formulated in a nanoparticle, and wherein the peptide is bound externally to the nanoparticle. In some aspects, the nanoparticle is a liposome. In some aspects, the vector delivers DNA or mRNA. In some aspects, the ratio of the peptide to the I/O is 1:1, 1:2, 1:3, 1:4, 1:8, 2:1, 3:1, 4:1, or 8:1.

[0035] In some aspects, the administering is via inhalation, intranasally, orally, topically, parenterally, intravenously, subcutaneously, intra-tumoral injection, intramuscular administration, intraperitoneal administration, dermal administration, transdermal administration, intracerebraoventricular administration, or intrathecal administration, or a combination thereof.

[0036] In some aspects, the peptide has at least 70%, at least 75%, at least 80%, at least 85%, at least 90%, at least 91%, at least 92%, at least 93%, at least 94%, at least 95%, at least 96%, at least 97%, at least 98%, at least 99%, or at least 100% sequence identity with any one of SEQ ID NO: 1-SEQ ID NO: 567, SEQ ID NO: 1243-SEQ ID NO: 1252, or SEQ ID NO: 1263-SEQ ID NO: 1289, wherein upon administration to a subject the peptide homes, targets, migrates to, accumulates in, binds to, is retained by, is processed by, or is directed to a tumor of the subject.

[0037] In some aspects, the peptide has at least 70%, at least 75%, at least 80%, at least 85%, at least 90%, at least 91%, at least 92%, at least 93%, at least 94%, at least 95%, at least 96%, at least 97%, at least 98%, at least 99%, or at least 100% sequence identity with any one of SEQ ID NO: 568-SEQ ID NO: 1134, SEQ ID NO: 1253-SEQ ID NO: 1262, or SEQ ID NO: 1290-SEQ ID NO: 1316, wherein upon administration to a subject the peptide homes, targets, migrates to, accumulates in, binds to, is retained by, is processed by, or is directed to a tumor of the subject. In some aspects, the peptide targets the I/O to cytoplasm, endoplasmic reticulum, Golgi apparatus, endosome, lysosome, or any combination thereof in a cell. In some aspects, the peptide homes to a cancer. In some aspects, the cancer is a brain cancer, a brain tumor, breast cancer, melanoma, sarcoma, basal cell carcinoma, squamous cell carcinoma, lung, colorectal, prostate and bladder cancer, or any combination thereof.

[0038] In some aspects, the composition further comprising administering a PD-1 or PDL1 therapy. In some aspects, the PD-1 or PDL1 therapy comprises PD-1 inhibitors, PDL1 inhibitors, checkpoint inhibitors, or any combination thereof. In some aspects, the peptide comprises 4 or more cysteine residues. In some aspects, the peptide comprises 6 or more cysteine residues. In some aspects, the peptide comprises three or more disulfide bridges formed between cysteine residues.

[0039] In some aspects, the peptide comprises three or more disulfide bridges formed between cysteine residues, wherein one of the disulfide bridges passes through a loop formed by two other disulfide bridges. In some aspects, the peptide comprises a plurality of disulfide bridges formed between cysteine residues. In some aspects, the peptide comprises a disulfide through a disulfide knot. In some aspects, at least one amino acid residue of the peptide is in an L configuration or, wherein at least one amino acid residue of the peptide is in a D configuration.

[0040] In some aspects, the sequence comprises at least 11, at least 12, at least 13, at least 14, at least 15, at least 16, at least 17, at least 18, at least 19, at least 20, at least 21, at least 22, at least 23, at least 24, at least 25, at least 26, at least 27, at least 28, at least 29, at least 30, at least 31, at least 32, at least 33, at least 34, at least 35, at least 36, at least 37, at least 38, at least 39, at least 40, at least 41, at least 42, at least 43, at least 44, at least 45, at least 46, at least 47, at least 48, at least 49, at least 50, at least 51, at least 52, at least 53, at least 54, at least 55, at least 56, at least 57, at least 58 residues, at least 59, at least 60, at least 61, at least 62, at least 63, at least 64, at least 65, at least 66, at least 67, at least 68, at least 69, at least 70, at least 71, at least 72, at least 73, at least 74, at least 75, at least 76, at least 77, at least 78, at least 79, at least 80, or at least 81 residues.

[0041] In some aspects, any one or more K residues are replaced by an R residue or wherein any one or more R residues are replaced by for a K residue. In some aspects, any one or more M residues are replaced by any one of the I, L, or V residues. In some aspects, any one or more L residues are replaced by any one of the V, I, or M residues. In some aspects, any one or more I residues are replaced by any of the M, L, or V residues. In some aspects, any one or more V residues are replaced by any of the M, I, or L residues. In some aspects, any one or more G residues are replaced by an A residue or wherein any one or more A residues are replaced by a G residue. In some aspects, any one or more S residues are replaced by a T residue or wherein any one or more T residues are replaced by for an S residue. In some aspects, any one or more Q residues are replaced by an N residue or wherein any one or more N residues are replaced by a Q residue. In some aspects, any one or more D residues are replaced by an E residue or wherein any one or more E residues are replaced by a D residue.

[0042] In some aspects, at least one residue of the peptide comprises a chemical modification. In some aspects, the chemical modification is blocking the N-terminus of the peptide. In some aspects, the chemical modification is methylation, acetylation, or acylation. In some aspects, the chemical modification is: methylation of one or more lysine residues or analogue thereof; methylation of the N-terminus; or methylation of one or more lysine residue or analogue thereof and methylation of the N-terminus.

[0043] In some aspects, the peptide is linked to an acyl adduct. In some aspects, the peptide is SEQ ID NO: 1. In some aspects, the peptide is SEQ ID NO: 2. In some aspects, the peptide is SEQ ID NO: 568. In some aspects, the peptide is SEQ ID NO: 569. In some aspects, the peptide is SEQ ID NO: 570. In some aspects, the peptide-I/O complex further comprises an additional cell penetrating peptide. In some aspects, the cell penetrating peptide enhances cell penetration, cytosolic delivery, endosomal uptake, endosomal escape, or a combination thereof of the peptide-I/O complex.

[0044] In some aspects, the cell penetrating peptide comprises any one of SEQ ID NO: 1207-SEQ ID NO: 1224 or SEQ ID NO: 1382-SEQ ID NO: 1400 or SEQ ID NO: 1442-SEQ ID NO: SEQ ID NO: 1490. In some aspects, the cell penetrating peptide is a cysteine dense peptide.

[0045] In some aspects, the cysteine dense peptide comprises imperatoxin A, maurocalcine, MCoTI-II, EETI-II, kalata B1, SFTI-1, CyLoP-1, or any combination thereof. In some aspects, a modification is made to the peptide. In some aspects, the modification is addition of an amino acid in a loop region of the peptide, modification of an amino acid in a loop region of the peptide. In some aspects, the modification is incorporation of a non-peptidic molecule, a small molecule, a polymer, a lipid, or any combination thereof. In some aspects, the modification comprises a formulation, non-covalent complexation, grafting, fusion, or any combination thereof.

[0046] In some aspects, the peptide comprises a sequence having at least 80%, at least 85%, at least 90%, at least 95%, at least 96%, at least 97%, at least 98%, at least 99%, or at least 100% identical to SEQ ID NO: 1, SEQ ID NO: 2, SEQ ID NO: 568, SEQ ID NO: 569, or SEQ ID NO: 570 and the I/O comprises a sequence of SEQ ID NO: 1135 SEQ ID NO: 1169, SEQ ID NO: 1163, SEQ ID NO: 1176, SEQ ID NO: 1177, SEQ ID NO: 1178, SEQ ID NO: 1179 or a fragment or variant thereof.

[0047] In some aspects, the peptide-I/O complex comprises

[chemical structure]

[0048] In some aspects, the peptide-I/O complex comprises a RIG-I ligand comprising one or more modified nucleotide bases. In some aspects, the peptide-I/O complex comprises a RIG-I ligand comprising one or more nucleotide bases modified with 2′ fluoro groups, phosphorothioate linkages, LNA or BNA nucleic acids, or 2′ OMe groups. In some aspects, the peptide-I/O complex comprises a RIG-I ligand comprising one or more bases containing a 2′ fluoro modification. In some aspects, the peptide-I/O complex comprises a RIG-I ligand comprising 25%, 50%, 75%, or 100% of bases containing a 2′ fluoro modification. In some aspects, the peptide-I/O complex comprises a RIG-I ligand comprising one or more bases containing a phosphorothioate linkage. In some aspects, the peptide-I/O complex comprises a RIG-I ligand comprising at least two of each nucleotides at the 5′ and at the 3′ end contain a phosphorothioate linkage. In some aspects, the peptide-I/O complex comprises a RIG-I ligand comprising at least two of each nucleotides at the 3′ end contain a phosphorothioate linkage.

[0049] In some aspects, the peptide-I/O complex comprises:

[chemical structure]

where X and Y are complementary strands of RNA that are each 5-200 bases long and the peptide comprises SEQ ID NO: 569 or SEQ ID NO: 570. In some aspects, the peptide comprises SEQ ID NO: 569 or SEQ ID NO: 570, the I/O comprises a 5′ppp dsRNA, wherein the dsRNA is a double stranded RNA or a hairpin RNA and wherein the dsRNA comp-rises 5-100 base pairs or 10-40 base pairs.

[0050] In some aspects, the peptide comprises a sequence having at least 80%, at least 85%, at least 90%, at least 95%, at least 96%, at least 97%, at least 98%, at least 99%, or at least 100% identical to SEQ ID NO: 1, SEQ ID NO: 2, SEQ ID NO: 568, SEQ ID NO: 569, or SEQ ID NO: 570 and the I/O comprises a sequence of SEQ ID NO: 1371, SEQ ID No: 1424 and SEQ ID NO 1425, SEQ ID No: 1375, SEQ ID No: 1376 or a fragment or variant thereof. In some aspects, the composition further comprises CD28-CTLA4, Lag-3, or TIGIT therapy. In some aspects, the peptide-I/O complex comprises the structure set forth in any one of FIG. 34-FIG. 44 and FIG. 55-FIG. 79. In some aspects, the peptide further comprises a diagnostic or imaging agent, such as chemical agent, radiolabel agent, radiosensitizing agent, fluorophore, imaging agent, diagnostic agent, protein, peptide, or small molecule.

[0051] In various aspects, the present disclosure provides a method of treating a cancer in a subject in need thereof, the method comprising: administering to the subject a therapeutically effective amount of any one of the compositions described above.

[0052] In various aspects, the present disclosure provides a method of delivering an immuno-oncology agent (I/O) to a tumor, the method comprising: a) providing a peptide-immuno-oncology agent complex (peptide-I/O complex) of any one of the above described compositions; and b) administering the peptide-I/O complex to a subject in need thereof, wherein the peptide-I/O complex homes to a tumor after administering.

[0053] In various aspects, the present disclosure provides a method of delivering an immuno-oncology agent (I/O) intracellularly, the method comprising a) providing a peptide-immuno-oncology agent complex (peptide-I/O complex) of any one of the above described compositions; and b) administering the peptide-I/O complex to a subject in need thereof, wherein the peptide-I/O complex penetrates a cell after administering.

[0054] In various aspects, the present disclosure provides a method of delivering an immuno-oncology agent (I/O) across the blood brain barrier (BBB), the method comprising a) providing a peptide-immuno-oncology agent complex (peptide-I/O complex) of any one of the above described compositions; and b) administering the peptide-I/O complex to a subject in need thereof, wherein the peptide-I/O complex penetrates the BBB after administration.

[0055] In various aspects, the present disclosure provides a method of treating or delivering a peptide-I/O complex to a subject in need thereof according to any one of claims 189-192, the method further comprises administering a companion diagnostic or imaging agent, wherein the companion diagnostic or imaging agent comprises a) a peptide-I/O complex of any of the above described compositions, b) a peptide-I/O complex of any of the above described compositions, wherein the peptide further comprises a diagnostic or imaging agent, such as chemical agent, radiolabel agent, radiosensitizing agent, fluorophore, imaging agent, diagnostic agent, protein, peptide, or small molecule; or c) a peptide of SEQ ID NO:1-SEQ ID NO: 1316 further comprising a diagnostic or imaging agent, wherein the diagnostic or imaging agent comprises a chemical agent, a radiolabel agent, radiosensitizing agent, fluorophore, an imaging agent, a diagnostic agent, a protein, a peptide, or a small molecule. In some aspects, the companion diagnostic or imaging agent is detected by a device. In some aspects, the device incorporates radiology or fluorescence, including the X-ray radiography, magnetic resonance imaging (MRI), ultrasound, endoscopy, elastography, tactile imaging, thermography, flow cytometry, medical photography, nuclear medicine functional imaging techniques, positron emission tomography (PET), single-photon emission computed tomography (SPECT), surgical instrument, operating microscope, confocal microscope, fluorescence scope, exoscope, or a surgical robot.

### INCORPORATION BY REFERENCE

[0056] All publications, patents, and patent applications mentioned, disclosed or referenced in this specification are herein incorporated by reference in their entirety and to the same extent as if each individual publication, patent, or patent application was specifically and individually indicated to be incorporated by reference.

### BRIEF DESCRIPTION OF THE FIGURES

[0057] The novel features of the invention are set forth with particularity in the appended claims. A better understanding of the features and advantages of the present disclosure will be obtained by reference to the following detailed description that sets forth illustrative embodiments, in which the principles of the disclosure are utilized, and the accompanying drawings of which: FIG. 1 illustrates incorporation of the shown groups on RNA or DNA.

[0058] FIG. 1A illustrates structures of oligonucleotides containing a 5′-thiol (thiohexyl; C6) modification (left), and a 3′-thiol (C3) modification (right).

[0059] FIG. 1B illustrates an MMT-hexylaminolinker phosphoramidite.

[0060] FIG. 1C illustrates a TFA-pentylaminolinker phosphoramidite.

[0061] FIG. 1D illustrates RNA residues incorporating amine or thiol residues.

[0062] FIG. 1E illustrates oligonucleotides with aminohexyl modifications at the 5′ (left) and 3′ ends (right).

[0063] FIG. 2 illustrates an example of a RIG-I ligand, which was synthesized using 2′-fluoropyrimidines to increase backbone stability. FIG. 2 discloses SEQ ID NO: 1197.

[0064] FIG. 3 illustrates a specific peptide-immuno-oncology agent complex (peptide-I/O complex) comprising an exemplary RLIX peptide-immuno-oncology agent complex (RLIX peptide-I/O complex) comprising an exemplary IL-15 hyperagonist fusion with an exemplary chlorotoxin or chlorotoxin derivative peptide.

[0065] FIG. 3A illustrates a cartoon of an exemplary RLIX peptide-I/O complex from the N to C-terminus direction with an exemplary IL-15Ra, linker, IL-15, and chlorotoxin or chlorotoxin derivative peptide.

[0066] FIG. 3B illustrates the sequence of an exemplaryRLIX peptide-I/O complex of FIG. 3A. FIG. 3B discloses SEQ ID NO: 1173.

[0067] FIG. 4 illustrates a specific peptide-I/O complex comprising an exemplary ILRX peptide-immunooncology agent complex (ILRX peptide-I/O complex) comprising an exemplary IL-15 hyperagonist fusion with an exemplary chlorotoxin or chlorotoxin derivative peptide.

[0068] FIG. 4A illustrates a cartoon of the exemplary ILRX peptide-I/O complex from the N to C-terminus direction with an exemplary IL-15, linker, IL-15Ra, and chlorotoxin or chlorotoxin derivative peptide.

[0069] FIG. 4B illustrates the sequence of the exemplary ILRX peptide-I/O complex of FIG. 4A. FIG. 4B discloses SEQ ID NO: 1174.

[0070] FIG. 5 illustrates two examples of I/Os comprising non-nucleic acid benzobisthiazole compounds, which can be RIG-I ligands, as provided by Probst et al. (Vaccine. 2017 Apr. 4;35(15): 1964-1971).

[0071] FIG. 6 illustrates examples of I/Os comprising RIG-I ligands, specifically single stranded RNA, as provided by Lee et al. (Nucleic Acid Therapeutics. 2016 26(3): 173-182). FIG. 6 discloses SEQ ID NOS 1199, 1201, 1202, 1516 and 1200, respectively, in order of appearance.

[0072] FIG. 7 illustrates STING ligands that can be complexed as an I/O with any peptide of the present disclosure, as provided by Kato et al. (J Interferon Cytokine Res. 2017 May; 37(5):207-213)).

[0073] FIG. 8 illustrates cyclic-dinucleotides (CDNs) that can be complexed as an I/O with any peptide of the present disclosure, as provided by Li et al. (Nat Chem Biol. 2015 September;11(9):741).

[0074] FIG. 9 illustrates cyclic-dinucleotides (CDNs) that can be complexed as an I/O with any peptide of the present disclosure, as provided by Lioux et al. (J Med Chem. 2016 Nov. 23;59(22): 10253-10267).

[0075] FIG. 10 illustrates a DSDP STING ligand that can be complexed as an I/O with any peptide of the present disclosure, as provided by Liu et al. (Antiviral Res. 2017 November; 147:37-46).

[0076] FIG. 11 illustrates synthetic analogs of cGAMP that can be complexed as an I/O with any peptide of the present disclosure, as provided in U.S. Pat. No. 9,724,408.

[0077] FIG. 12 illustrates STING ligands that can be complexed as an I/O with any peptide of the present disclosure.

[0078] FIG. 12A illustrates a STING ligand I/O comprising bis-phosphorothioate in the cyclic phosphodiester, which can serve as a reactive thiol during conjugation. Said thiol can be reacted with maleimide, bromoacetyl, iodoacetyl, or pyridyldithiol groups.

[0079] FIG. 12B illustrates the C-8 position on a 5 member ring comprising a purine base within a CDN, which can be brominated with an N-bromosuccinimide (NBS) to provide a reactive bromine group. This bromine group serve as a reactive group for coupling with an amine-containing group comprising a functional handle, for example, a thiol or a protected amine.

[0080] FIG. 13 illustrates generation of a cleavable disulfide linkage between a peptide (e.g., chlorotoxin or chlorotoxin derivative peptide) and a cyclic dinucleotide.

[0081] FIG. 14 illustrates a short Flu A genome (segment 5; NC-002019), as provided by Schlee et al. Similar structures minimicking a 5′->3′ ssRNA ssRNA that result in hairpin structures, such as SEQ ID NO: 1193, can be used as an analog. FIG. 14 discloses SEQ ID NO: 1517.

[0082] FIG. 15 illustrates a genome RNA sequence (NC-002617), as provided by Schlee et al. Similar structures minimicking a 5′->3′ ssRNA ssRNA that result in hairpin structures, such as SEQ ID NO: 1194, can be used as an analog. FIG. 15 discloses SEQ ID NO: 1518.

[0083] FIG. 16 illustrates a CT26 tumor sample that was microinjected with a peptide-I/O complex of FIG. 37, a peptide-I/O complex of FIG. 37+chloroquine, chloroquine (CQ), or 5′ppp dsRNA+PEI and harvested and stained 4 hours post-treatment. The dotted arrows indicate some of the locations of the injections and the white punctate spots indicate CC3 staining. A large region showed CC3 staining for the site injected with the peptide-I/O complex of FIG. 37+chloroquine, whereas the sites injected with a peptide-I/O complex of FIG. 37, chloroquine, or 5′ppp dsRNA+PEI did not have a significant region of CC3 staining.

[0084] FIG. 17 illustrates a CT26 tumor sample from a different animal that was microinjected with a peptide-I/O complex of FIG. 37, a peptide-I/O complex of FIG. 37+chloroquine, chloroquine, or 5′ppp dsRNA+PEI and harvested and stained 24 hours after treatment. The dotted arrows indicate some of the locations of the injections and the white punctate spots indicate some of the CC3 staining. A large region showed CC3 staining for the site injected with the peptide-I/O complex of FIG. 37 and for the site injected with the peptide-I/O complex of FIG. 37+chloroquine, whereas the sites injected with 5′ppp dsRNA+PEI did not have a significant region of CC3 staining. The site injected with chloroquine is not present in this tumor sample.

[0085] FIG. 18 illustrates a CT26 tumor sample from a different animal that was microinjected with a peptide-I/O complex of FIG. 37, a peptide-I/O complex of FIG. 37+chloroquine, chloroquine, or 5′ppp dsRNA+PEI and harvested and stained 24 hours after treatment. The arrows or circled areas indicate some of the locations of the injections and the white punctate spots indicate some of the CC3 staining. A large region showed CC3 staining for the site injected with the peptide-I/O complex of FIG. 37 and for the site injected with 5′ppp dsRNA+PEI. The CQ and the peptide-IO complex of FIG. 37+chloroquine are uninterpretable due to merging with a general area of tumor necrosis in this sample.

[0086] FIG. 19 illustrates the luminescence signal in relative luminescence units (RLUs) from activating the IFN pathway in SEAP reporter cells 24, 48, or 72 hours after treating the cells with 12 pmol or 120 pmol of a peptide-I/O complex of FIG. 37, a 5′ppp dsRNA (denoted as “5′PPP dsRNA Pos Control” in FIG. 19) which is SEQ ID NO: 1424 (with triphosphate on the 5′ end) and SEQ ID NO: 1425 (no terminal phosphates) complexed together(the same sequence of 5′ppp RNA as in the peptide-I/O complex of FIG. 37, double-stranded but without the peptide-linker), or a dsRNA (denoted as “dsRNA Neg Control” in FIG. 19) which is SEQ ID NO: 1424 and SEQ ID NO: 1425 (no terminal phosphates on either strand) complexed together (the same sequence of RNA double-stranded as in the peptide-I/O complex of FIG. 37, but without the 5′ppp and without the peptide-linker).

[0087] FIG. 20 illustrates fold increase in signal by dosing 12 pmol or 120 pmol of a peptide-I/O complex of FIG. 37 as compared to the 5′ppp dsRNA described in FIG. 19 at 24, 48, and 72 hours post-treatment.

[0088] FIG. 21 illustrates the relative luminescence units (RLU) 24 after treating the cells with 12 pmol of a peptide-I/O complex of FIG. 37, a peptide-I/O complex of FIG. 34, 5′ppp dsRNA Pos Control described in FIG. 19 (denoted as “5′PPP dsRNA”), or dsRNA Neg Control described in FIG. 19 (denoted as “dsRNA(no5′PPP)”)(the same sequence of RNA double-stranded but without the 5′ppp and without the peptide-linker).

[0089] FIG. 22 illustrates RLU signal by dosing 5′ppp dsRNA Pos Control described in FIG. 19 (denoted as “5′PPP dsRNA”)+tfxn, the peptide-I/O complex of FIG. 37+tfxn, the peptide-I/O complex of FIG. 34+tfxn, or dsRNA Neg Control described in FIG. 19 (denoted as “dsRNA(no5′PPP)”)+tfxn, where Lipofectamine transfection reagent is also added to each test article formulation (“tfxn”).

[0090] FIG. 23 illustrates a white light image (top row) and the fluorescence signal (bottom row) in a CT26 tumor of a control, uninjected mouse and the signal in tumors from 2 mice that were injected with a peptide of SEQ ID NO: 569 conjugated to an ICG dye (see molecule shown in FIG. 27).

[0091] FIG. 24 illustrates a white light image (top row) and the fluorescence signal (bottom row) in a B16F10 tumor of a control, uninjected mouse and the signal in tumors from 2 mice that were injected with a peptide of SEQ ID NO: 569 conjugated to an ICG dye (see molecule shown in FIG. 27).

[0092] FIG. 25 illustrates a white light image (top row) and the fluorescence signal in a A20 tumor and in the muscle of a control, uninjected mouse and the signal in tumors and in the muscle (contralateral flank) from 2 mice that were injected with a peptide of SEQ ID NO: 569 conjugated to an ICG dye (see molecule shown in FIG. 27).

[0093] FIG. 26 illustrates various chemical structures of the present disclosure.

[0094] FIG. 26A illustrates the structure of KIN1148.

[0095] FIG. 26B illustrates the structure of ADU-S100.

[0096] FIG. 26C illustrates the structure of DMXAA.

[0097] FIG. 27 illustrates the structure of the peptide of SEQ ID NO. 569 conjugated to an ICG dye, with lines representing disulfide bonds between cysteine residues.

[0098] FIG. 28 illustrates proliferation curves for CTLL2 cells.

[0099] FIG. 28A illustrates proliferation curves for CTLL2 cells after exposure to increasing concentrations of SEQ ID NO: 1317, SEQ ID NO: 1318, SEQ ID NO: 1319, and SEQ ID NO: 1321 and His-tagged RLI protein (SEQ ID NO: 1342).

[0100] FIG. 28B illustrates the CTLL2 proliferation curve for SEQ ID NO: 1320, an IL-15 (SEQ ID NO: 1177), and a His-tagged RLI (SEQ ID NO: 1342). Each data point represents an average of n=3. RFU-relative fluorescence units.

[0101] FIG. 29 illustrates proliferation curves for Mole cells after exposure to increasing concentration of SEQ ID NO: 1317, SEQ ID NO: 1318, SEQ ID NO: 1319, SEQ ID NO: 1320, and SEQ ID NO: 1321 and a His-tagged RLI (SEQ ID NO: 1342). Each curve shows an n=3 per group and error bars represent standard error of the mean (SEM).

[0102] FIG. 30 illustrates proliferation curves for CD8+primary human T cells and PHA induced T cell blasts from the same CD8 T cell donor.

[0103] FIG. 30A illustrates proliferation curves for CD8+primary human T cells after exposure to increasing concentration of SEQ ID NO: 1317, SEQ ID NO: 1318, SEQ ID NO: 1319, SEQ ID NO: 1320, and SEQ ID NO: 1321 and a His-tagged RLI (SEQ ID NO: 1342). Each point on the curve shows an average of n=3 per group. RFU-Relative Fluorescence units.

[0104] FIG. 30B illustrates proliferation curves for PHA induced T cell blasts from the same CD8 T cell donor as FIG. 30A after exposure to increasing concentration of SEQ ID NO: 1317, SEQ ID NO: 1318, SEQ ID NO: 1319, SEQ ID NO: 1320, and SEQ ID NO: 1321 and a His-tagged RLI (SEQ ID NO: 1342). Each point on the curve shows an average of n=3 per group. RFU-Relative Fluorescence units.

[0105] FIG. 31 illustrates cytokine activity, with (+) and without (−) cathepsin B treatment at pH 5, for a His-tagged RLI (SEQ ID NO: 1342) and a peptide-IL-15 agent complex of SEQ ID NO: 1318 in Mo7e cells at various concentrations (nM) of the peptide-IL-15 agent complex or RLI as noted. Each point on the curve shows an average of n=3 per group. Each point on the curve shows an average of n=3 per group.

[0106] FIG. 32 illustrates Cathepsin B cleavage in a CTLL2 proliferation assay.

[0107] FIG. 32A illustrates cytokine activity, after cathepsin B treatment at pH 7, SEQ ID NO: 1319 in CTLL2 cells. Each point on the curve shows an average of n=3 per group.

[0108] FIG. 32B illustrates cytokine activity, after cathepsin B treatment at pH 7, S SEQ ID NO: 1321 in CTLL2 cells. Each point on the curve shows an average of n=3 per group.

[0109] FIG. 33 illustrates cytokine activity, after cathepsin B treatment at pH 5, SEQ ID NO: 1317 in CTLL2 cells. Each point on the curve shows an average of n=3 per group.

[0110] FIG. 34 illustrates a peptide-I/O complex comprising a peptide of SEQ ID NO: 568 and an I/O comprising a dsRNA (SEQ ID NO: 1371), linked together by a disulfide cleavable linker, where the linker is attached to a modified base in the dsRNA used as a conjugation or linkage site (e.g., as shown in the FIG. a uridine in SEQ ID NO: 1371 is modified to be uridine with an extended amine attached to the linker, which linker is also attached to the peptide [as denoted]). Note the dsRNA of SEQ ID NO: 1371 in this peptide-I/O complex has a 5′ppp (triphosphate) and is formed as a hairpin structure.

[0111] FIG. 35 illustrates the disulfide cleavage product of a peptide of the peptide-I/O complex of FIG. 34.

[0112] FIG. 36 illustrates a peptide-I/O complex comprising a peptide of SEQ ID NO: 568 and an I/O comprising a dsRNA (SEQ ID NO: 1371), linked together by an extended stable linker, where the linker is attached to a modified base in the dsRNA used as a conjugation or linkage site (e.g., as shown in the figure, a uridine in SEQ ID NO: 1371 is modified to be uridine with an extended amine attached to the linker, and the linker is also attached to the peptide (as denoted)). The dsRNA of SEQ ID NO: 1371 in this peptide-I/O complex has a 5′ppp (triphosphate) and is formed as a hairpin structure.

[0113] FIG. 37 illustrates a peptide-I/O complex comprising a peptide of SEQ ID NO: 569 and an I/O comprising a dsRNA (SEQ ID NO: 1371), linked together by an extended stable linker, where the linker is attached to a modified base in the dsRNA used as a conjugation or linkage site (e.g., as shown in the figure, a uridine in SEQ ID NO:1371 is modified to be uridine with an extended amine attached to the linker, and the linker is also attached to the peptide (as denoted)). The dsRNA of SEQ ID NO: 1371 in this peptide-I/O complex has a 5′ppp (triphosphate) and is formed as a hairpin structure.

[0114] FIG. 38 illustrates a peptide-I/O complex comprising a peptide of SEQ ID NO: 569 conjugated to an ICG dye (see the peptide complex of FIG. 27) and an I/O comprising a dsRNA (SEQ ID NO:1371), linked together with an extended stable linker, where the linker is attached to a modified base in the dsRNA used as a conjugation or linkage site (e.g., as shown in the figure, a uridine in SEQ ID NO: 1371 is modified to be uridine with an extended amine attached to the linker, and the linker is also attached to the peptide (as denoted)). The dsRNA of SEQ ID NO: 1371 in this peptide-I/O complex has a 5′ppp (triphosphate) and is formed as a hairpin structure.

[0115] FIG. 39 illustrates a peptide-I/O complex comprising a peptide of SEQ ID NO: 569 and an I/O comprising a dsRNA (SEQ ID NO: 1371), linked together by a hydrazone/PEG linker, where the linker is attached to a modified base in the dsRNA used as a conjugation or linkage site (e.g., as shown in the figure, a guanosine in SEQ ID NO: 1371 is a modified guanosine attached to the linker, and the linker is also attached to the peptide (as denoted)). The dsRNA of SEQ ID NO: 1371 in this peptide-I/O complex has a 5′ppp (triphosphate) and is formed as a hairpin structure.

[0116] FIG. 40 illustrates a peptide-I/O complex comprising a peptide of SEQ ID NO: 569 and an I/O comprising a dsRNA (SEQ ID NO: 1371), linked together by a disulfide/PEG linker, where the linker is attached to a modified base in the dsRNA used as a conjugation or linkage site (e.g., as shown in the figure, a guanosine in SEQ ID NO: 1371 is a modified guanosine attached to the linker, and the linker is also attached to the peptide (as denoted)). The dsRNA of SEQ ID NO: 1371 in this peptide-I/O complex has a 5′ppp (triphosphate) and is formed as a hairpin structure.

[0117] FIG. 41 illustrates a peptide-I/O complex comprising a peptide of SEQ ID NO: 569 conjugated to an ICG dye and an I/O comprising a dsRNA (SEQ ID NO: 1371), linked together by a disulfide/PEG linker, where the linker is attached to a modified base in the dsRNA used as a conjugation or linkage site (e.g., as shown in the figure, a guanosine in SEQ ID NO: 1371 is a modified guanosine attached to the linker, and the linker is also attached to the peptide (as denoted)). The dsRNA of SEQ ID NO: 1371 in this peptide-I/O complex has a 5′ppp (triphosphate) and is formed as a hairpin structure.

[0118] FIG. 42 illustrates a peptide-I/O complex comprising a peptide of SEQ ID NO: 569 and an I/O comprising a dsRNA (SEQ ID NO: 1371), linked together by a hydrazone linker, where the linker is attached to a modified base in the dsRNA used as a conjugation or linkage site (e.g., as shown in the figure, a guanosine in SEQ ID NO: 1371 is a modified guanosine attached to the linker, and the linker is also attached to the peptide (as denoted). The dsRNA of SEQ ID NO: 1371 in this peptide-I/O complex has a 5′ppp (triphosphate) and is formed as a hairpin structure.

[0119] FIG. 43 illustrates a peptide-I/O complex comprising a peptide of SEQ ID NO: 569 and an I/O comprising a dsRNA (SEQ ID NO: 1371), linked together by a long disulfide linker, where the linker is attached to a modified base in the dsRNA used as a conjugation or linkage site (e.g., as shown in the figure, a guanosine in SEQ ID NO: 1371 is a modified guanosine attached to the linker, and the linker is also attached to the peptide (as denoted)). The dsRNA of SEQ ID NO: 1371 in this peptide-I/O complex has a 5′ppp (triphosphate) and is formed as a hairpin structure.

[0120] FIG. 44 illustrates a peptide-I/O complex comprising a peptide of SEQ ID NO: 569 and an I/O comprising a dsRNA (SEQ ID NO: 1371), linked together by a short disulfide linker, where the linker is attached to a modified base in the dsRNA used as a conjugation or linkage site (e.g., as shown in the figure, a guanosine in SEQ ID NO: 1371 is a modified guanosine attached to the linker, which linker is also attached to the peptide (as denoted)). The dsRNA of SEQ ID NO: 1371 in this peptide-I/O complex has a 5′ppp (triphosphate) and is formed as a hairpin structure.

[0121] FIG. 45 illustrates coomassie-stained SDS-PAGE and anti-His Western analysis of an RLI protein (such as containing SEQ ID NO: 1169, SEQ ID NO: 1176, and SEQ ID NO: 1177) as a His-tagged RLI protein (SEQ ID NO: 1342) and shows strong signal of two bands, around 25-26 and 30-34 kDa.

[0122] FIG. 46 illustrates the chromatogram and SDS-PAGE analysis of IMAC purification of an RLI protein as a His-tagged RLI protein (SEQ ID NO: 1342).

[0123] FIG. 47 illustrates coomassie-stained SDS-PAGE and anti-His Western analysis of the conditioned media from expression of SEQ ID NO: 1317-SEQ ID NO: 1321.

[0124] FIG. 48 illustrates Coomassie-stained SDS-PAGE of fractions obtained from the small-scale purification of peptide-IL-15 agent complexes of SEQ ID NO: 1317 and SEQ ID NO: 1321.

[0125] FIG. 49 illustrates Coomassie-stained SDS-PAGE of purified fractions E2-E3 for each peptide-IL-15 agent complexes SEQ ID NO: 1317 (#3) and SEQ ID NO: 1321 (#5) after pooling and buffer exchange in PBS.

[0126] FIG. 50 illustrates Coomassie-stained SDS-PAGE of fractions obtained from the small-scale purification of SEQ ID NO: 1318.

[0127] FIG. 51 illustrates Coomassie-stained SDS-PAGE of purified fractions E2-E3 for peptide-IL-15 agent complex of SEQ ID NO: 1318 (#4) after pooling and buffer exchange in PBS.

[0128] FIG. 52 illustrates Coomassie-stained SDS-PAGE of fractions obtained from the small-scale purification of SEQ ID NO: 1319 and SEQ ID NO: 1320.

[0129] FIG. 53 illustrates Coomassie-stained SDS-PAGE of fractions obtained from the large-scale purification of SEQ ID NO: 1317 and SEQ ID NO: 1321.

[0130] FIG. 54 illustrates Coomassie-stained SDS-PAGE of fractions E2-E4 for peptide-IL-15 agent complexes SEQ ID NO: 1317 (#3) and SEQ ID NO: 1321 (#5), which were pooled, buffer exchanged in PBS, and further analyzed under reducing and non-reducing conditions.

[0131] FIG. 55 illustrates a peptide-I/O complex of the present disclosure comprising a peptide of SEQ ID NO: 568 and an I/O comprising a dsRNA of SEQ ID NO: 1375 linked by a stable linker, where the linker is attached to a modified base in the dsRNA used as a conjugation or linkage site (e.g., as shown in the figure, a uridine in SEQ ID NO: 1375 is modified to be uridine with an extended amine attached to the linker, and the linker is also attached to the peptide (as denoted)). The dsRNA of SEQ ID NO: 1375 in this peptide-I/O complex has a 5′ppp (triphosphate) and is formed as a hairpin structure.

[0132] FIG. 56 illustrates a peptide I/O complex of the present disclosure comprising a peptide of SEQ ID NO: 569 and an I/O comprising a dsRNA of SEQ ID NO: 1375 linked by a stable linker, where the linker is attached to a modified base in the dsRNA used as a conjugation or linkage site (e.g., as shown in the figure, a uridine in SEQ ID NO: 1375 is modified to be uridine with an extended amine attached to the linker, and the linker is also attached to the peptide (as denoted)). The dsRNA of SEQ ID NO: 1375 in this peptide-I/O complex has a 5′ppp (triphosphate) and is formed as a hairpin structure.

[0133] FIG. 57 illustrates a peptide I/O complex of the present disclosure comprising a peptide of SEQ ID NO: 570 and an I/O comprising a dsRNA of SEQ ID NO: 1375 linked by a stable linker, where the linker is attached to a modified base in the dsRNA used as a conjugation or linkage site (e.g., as shown in the figure, a uridine in SEQ ID NO: 1375 is modified to be uridine with an extended amine attached to the linker, and the linker is also attached to the peptide (as denoted)). The dsRNA of SEQ ID NO: 1375 in this peptide-I/O complex has a 5′ppp (triphosphate) and is formed as a hairpin structure.

[0134] FIG. 58 illustrates a peptide-I/O complex of the present disclosure comprising a peptide of SEQ ID NO: 568 and an I/O comprising a dsRNA of SEQ ID NO: 1376 linked by a stable linker, where the linker is attached to a modified base in the dsRNA used as a conjugation or linkage site (e.g., as shown in the figure, a uridine in SEQ ID NO: 1376 is modified to be uridine with an extended amine attached to the linker, and the linker is also attached to the peptide (as denoted)). The dsRNA of SEQ ID NO: 1376 in this peptide-I/O complex has a 5′ppp (triphosphate) and is formed as a hairpin structure.

[0135] FIG. 59 illustrates a peptide I/O complex of the present disclosure comprising a peptide of SEQ ID NO: 569 and an I/O comprising a dsRNA of SEQ ID NO: 1376 linked by a stable linker, where the linker is attached to a modified base in the dsRNA used as a conjugation or linkage site (e.g., as shown in the figure, a uridine in SEQ ID NO: 1376 is modified to be uridine with an extended amine attached to the linker, and the linker is also attached to the peptide (as denoted)). The dsRNA of SEQ ID NO: 1376 in this peptide-I/O complex has a 5′ppp (triphosphate) and is formed as a hairpin structure.

[0136] FIG. 60 illustrates a peptide I/O complex of the present disclosure comprising a peptide of SEQ ID NO: 570 and an I/O comprising a dsRNA of SEQ ID NO: 1376 linked by a stable linker where the linker is attached to a modified base in the dsRNA used as a conjugation or linkage site (e.g., as shown in the figure, a uridine in SEQ ID NO: 1376 is modified to be uridine with an extended amine attached to the linker, and the linker is also attached to the peptide (as denoted)). The dsRNA of SEQ ID NO: 1376 in this peptide-I/O complex has a 5′ppp (triphosphate) and is formed as a hairpin structure.

[0137] FIG. 61 illustrates a peptide-I/O complex of the present disclosure comprising a peptide of SEQ ID NO: 568 and an I/O comprising a dsRNA of SEQ ID NO: 1371 linked by a stable linker, where the linker is attached to a modified base in the dsRNA used as a conjugation or linkage site (e.g., as shown in the figure, a uridine in SEQ ID NO: 1371 is modified to be uridine with an extended amine attached to the linker, and the linker is also attached to the peptide (as denoted)). The dsRNA of SEQ ID NO: 1371 in this peptide-I/O complex has a 5′ppp (triphosphate) and is formed as a hairpin structure.

[0138] FIG. 62 illustrates a peptide-I/O complex of the present disclosure comprising a peptide of SEQ ID NO: 569 and an I/O comprising a dsRNA of SEQ ID NO: 1371 linked by a stable linker, where the linker is attached to a modified base in the dsRNA used as a conjugation or linkage site (e.g., as shown in the figure, a uridine in SEQ ID NO: 1371 is modified to be uridine with an extended amine attached to the linker, and the linker is also attached to the peptide (as denoted)). The dsRNA of SEQ ID NO: 1371 in this peptide-I/O complex has a 5′ppp (triphosphate) and is formed as a hairpin structure.

[0139] FIG. 63 illustrates a peptide-I/O complex of the present disclosure comprising a peptide of SEQ ID NO: 570 and an I/O comprising a dsRNA of SEQ ID NO: 1371 linked by a stable linker, where the linker is attached to a modified base in the dsRNA used as a conjugation or linkage site (e.g., as shown in the figure, a uridine in SEQ ID NO: 1371 is modified to be uridine with an extended amine attached to the linker, and the linker is also attached to the peptide (as denoted)). The dsRNA of SEQ ID NO: 1371 in this peptide-I/O complex has a 5′ppp (triphosphate) and is formed as a hairpin structure.

[0140] FIG. 64 illustrates a peptide-I/O complex of the present disclosure comprising a peptide of SEQ ID NO: 568 and an I/O comprising a dsRNA of SEQ ID NO: 1376 linked by a stable linker, where the linker is attached to a modified base in the dsRNA used as a conjugation or linkage site (e.g., as shown in the figure, a uridine in SEQ ID NO: 1376 is modified to be uridine with an extended amine attached to the linker, and the linker is also attached to the peptide (as denoted)). The dsRNA of SEQ ID NO: 1376 in this peptide-I/O complex has a 5′pp (diphosphate) and is formed as a hairpin structure.

[0141] FIG. 65 illustrates a peptide-I/O complex of the present disclosure comprising a peptide of SEQ ID NO: 569 and an I/O comprising a dsRNA of SEQ ID NO: 1376 linked by a stable linker, where the linker is attached to a modified base in the dsRNA used as a conjugation or linkage site (e.g., as shown in the figure, a uridine in SEQ ID NO: 1376 is modified to be uridine with an extended amine attached to the linker, and the linker is also attached to the peptide (as denoted)). The dsRNA of SEQ ID NO: 1376 in this peptide-I/O complex has a 5′pp (diphosphate) and is formed as a hairpin structure.

[0142] FIG. 66 illustrates a peptide-I/O complex of the present disclosure comprising a peptide of SEQ ID NO: 570 and an I/O comprising a dsRNA of SEQ ID NO: 1376 linked by a stable linker, where the linker is attached to a modified base in the dsRNA used as a conjugation or linkage site (e.g., as shown in the figure, a uridine in SEQ ID NO: 1376 is modified to be uridine with an extended amine attached to the linker, and the linker is also attached to the peptide (as denoted)). The dsRNA of SEQ ID NO: 1376 in this peptide-I/O complex has a 5′pp (diphosphate) and is formed as a hairpin structure.

[0143] FIG. 67 illustrates a peptide-I/O complex of the present disclosure comprising a peptide of SEQ ID NO: 568 and an I/O comprising a dsRNA of two separate RNA strands complexed together comprising SEQ ID NO: 1426 and SEQ ID NO: 1427 (where 5′ppp is located on seq id no 1426) linked by a stable linker, where the linker is attached to a modified base appended to the dsRNA used as a conjugation or linkage site (e.g., as shown in the figure, a uridine appended to SEQ ID NO: 1426 is modified to be uridine with an extended amine attached to the linker, and the linker is also attached to the peptide (as denoted)).

[0144] FIG. 68 illustrates a peptide-I/O complex of the present disclosure comprising a peptide of SEQ ID NO: 569 and an I/O comprising a dsRNA of two separate RNA strands complexed together comprising SEQ ID NO: 1426 and SEQ ID NO: 1427 (where 5′ppp is located on seq id no 1426) linked by a stable linker, where the linker is attached to a modified base appended to the dsRNA used as a conjugation or linkage site (e.g., as shown in the figure, a uridine appended to SEQ ID NO: 1426 is modified to be uridine with an extended amine attached to the linker, and the linker is also attached to the peptide (as denoted)).

[0145] FIG. 69 illustrates a peptide-I/O complex of the present disclosure comprising a peptide of SEQ ID NO: 570 and an I/O comprising a dsRNA of two separate RNA strands complexed together comprising SEQ ID NO: 1426 and SEQ ID NO: 1427 (where 5′ppp is located on seq id no 1426) linked by a stable linker, where the linker is attached to a modified base appended to the dsRNA used as a conjugation or linkage site (e.g., as shown in the figure, a uridine appended toSEQ ID NO: 1426 is modified to be uridine with an extended amine attached to the linker, and the linker is also attached to the peptide (as denoted)).

[0146] FIG. 70 illustrates a peptide-I/O complex of the present disclosure comprising a peptide of SEQ ID NO: 568 and an I/O comprising a dsRNA of two separate RNA strands complexed together comprising SEQ ID NO: 1424 and SEQ ID NO: 1425 (where 5′ppp is located on seq id no 1424) linked by a stable linker, where the linker is attached to a modified base appended tothe dsRNA used as a conjugation or linkage site (e.g., as shown in the figure, a uridine appended to SEQ ID NO: 1424 is modified to be uridine with an extended amine attached to the linker, and the linker is also attached to the peptide (as denoted)). The I/O comprising a dsRNA of two separate RNA strands complexed together comprising SEQ ID NO: 1424 and SEQ ID NO: 1425 (where 5′ppp is located on seq id no 1424) is also denoted as “5′ppp dsRNA” in FIG. 81.

[0147] FIG. 71 illustrates a peptide-I/O complex of the present disclosure comprising a peptide of SEQ ID NO: 569 and an I/O comprising a dsRNA of two separate RNA strands complexed together comprising SEQ ID NO: 1424 and SEQ ID NO: 1425 (where 5′ppp is located on seq id no 1424) linked by a stable linker, where the linker is attached to a modified base appended to the dsRNA used as a conjugation or linkage site (e.g., as shown in the figure, a uridine appended to SEQ ID NO: 1424 is modified to be uridine with an extended amine attached to the linker, and the linker is also attached to the peptide (as denoted)).

[0148] FIG. 72 illustrates a peptide-I/O complex of the present disclosure comprising a peptide of SEQ ID NO: 570 and an I/O comprising a dsRNA of two separate RNA strands complexed together comprising SEQ ID NO: 1424 and SEQ ID NO: 1425 (where 5′ppp is located on seq id no 1424) linked by a stable linker, where the linker is attached to a modified base appended to the dsRNA used as a conjugation or linkage site (e.g., as shown in the figure, a uridine appended to SEQ ID NO: 1424 is modified to be uridine with an extended amine attached to the linker, and the linker is also attached to the peptide (as denoted)).

[0149] FIG. 73 illustrates a peptide-I/O complex of the present disclosure comprising a peptide of SEQ ID NO: 568 and an I/O of SEQ ID NO: 1379 linked by a stable linker, where the linker is attached to a modified base in the dsRNA used as a conjugation or linkage site (e.g., as shown in the figure, a uridine in SEQ ID NO:1379 is modified to be uridine with an extended amine attached to the linker, and the linker is also attached to the peptide (as denoted)). The dsRNA of SEQ ID NO: 1379 in this peptide-I/O complex has a 5′ppp (triphosphate) and is formed as a hairpin structure.

[0150] FIG. 74 illustrates a peptide-I/O complex of the present disclosure comprising a peptide of SEQ ID NO: 569 and an I/O of SEQ ID NO: 1379 linked by a stable linker, where the linker is attached to a modified base in the dsRNA used as a conjugation or linkage site (e.g., as shown in the figure, a uridine in SEQ ID NO: 1371 is modified to be uridine with an extended amine attached to the linker, and the linker is also attached to the peptide (as denoted)). The dsRNA of SEQ ID NO: 1379 in this peptide-I/O complex has a 5′ppp (triphosphate) and is formed as a hairpin structure.

[0151] FIG. 75 illustrates a peptide-I/O complex of the present disclosure comprising a peptide of SEQ ID NO: 570 and an I/O of SEQ ID NO: 1379 linked by a stable linker, where the linker is attached to a modified base in the dsRNA used as a conjugation or linkage site (e.g., as shown in the figure, a uridine in SEQ ID NO:1371 is modified to be uridine with an extended amine attached to the linker, and the linker is also attached to the peptide (as denoted)). The dsRNA of SEQ ID NO: 1379 in this peptide-I/O complex has a 5′ppp (triphosphate) and is formed as a hairpin structure.

[0152] FIG. 76 illustrates a peptide-I/O complex of the present disclosure comprising a peptide of SEQ ID NO: 569 and an I/O of SEQ ID NO: 1371 (with phosphorothioate linkages as denoted by an asteryx(*)) linked by a stable linker, where the linker is attached to a modified base in the dsRNA used as a conjugation or linkage site (e.g., as shown in the figure, a uridine in SEQ ID NO: 1371 is modified to be uridine with an extended amine attached to the linker, and the linker is also attached to the peptide (as denoted)). The dsRNA of SEQ ID NO: 1371 in this peptide-I/O complex has a 5′ppp (triphosphate) and is formed as a hairpin structure.

[0153] FIG. 77 illustrates a peptide-I/O complex of the present disclosure comprising a peptide of SEQ ID NO: 569 and an I/O of SEQ ID NO: 1371 (with phosphorothioate linkages and 2′ fluoro RNA as denoted respectively by an asteryx (*) and letter “f”) linked by a stable linker, where the linker is attached to a modified base in the dsRNA used as a conjugation or linkage site (e.g., as shown in the figure, a uridine in SEQ ID NO: 1371 is modified to be uridine with an extended amine attached to the linker, and the linker is also attached to the peptide (as denoted)). The dsRNA of SEQ ID NO: 1371 in this peptide-I/O complex has a 5′ppp (triphosphate) and is formed as a hairpin structure.

[0154] FIG. 78 illustrates a peptide-I/O complex of the present disclosure comprising a peptide of SEQ ID NO: 569 and an I/O of SEQ ID NO: 1371 (with phosphorothioate linkages and 2′ fluoro RNA as denoted respectively by an asteryx (*) and letter “f”) linked by a stable linker, where the linker is attached to a modified base in the dsRNA used as a conjugation or linkage site (e.g., as shown in the figure, a uridine in SEQ ID NO: 1371 is modified to be uridine with an extended amine attached to the linker, and the linker is also attached to the peptide (as denoted)). The dsRNA of SEQ ID NO: 1371 in this peptide-I/O complex has a 5′ppp (triphosphate) and is formed as a hairpin structure.

[0155] FIG. 79 illustrates a peptide-I/O complex of the present disclosure comprising a peptide of SEQ ID NO: 569 and an I/O of SEQ ID NO: 1371 with phosphorothioate linkages and BNA/LNA as denoted respectively by an asteryx (*) and plus symbol (+) respectively) linked by a stable linker, where the linker is attached to a modified base in the dsRNA used as a conjugation or linkage site (e.g., as shown in the figure, a uridine in SEQ ID NO: 1371 is modified to be uridine with an extended amine attached to the linker, and the linker is also attached to the peptide (as denoted)). The dsRNA of SEQ ID NO: 1371 in this peptide-I/O complex has a 5′ppp (triphosphate) and is formed as a hairpin structure.

[0156] FIG. 80 illustrates the luminescence signal in relative luminescence units (RLUs) from activating the IFN pathway in SEAP reporter cells 24 hours after treating the cells with the transfection reagent Lipofectamine along with 16.2 pmole of each of a peptide-I/O complex of FIG. 34, a peptide-I/O complex of FIG. 36, an I/O of FIG. 35 (a cleavage product of the peptide-I/O of FIG. 34), and I/O of SEQ ID NO: 1371 with 5′ppp (the same sequence of 5′ppp hairpin RNA as in the peptide-I/O complex of FIG. 34 and of FIG. 36 but without modification and linakge to the peptide), or an I/O comprising a dsRNA of two separate RNA strands complexed together comprising SEQ ID NO: 1424 and SEQ ID NO: 1425 (the same sequence of RNA double-stranded as in the peptide-I/O complex of FIG. 34 and of FIG. 36 without the 5′ppp and without modification and linkage to peptide).

[0157] FIG. 81 illustrates an A20 lymphoma sample that was microinjected with a peptide-I/O complex of FIG. 37, PBS, DMXAA, 5′ppp dsRNA+in vivo jet PEI, and 5′ppp hpRNA. The white punctate spots indicate CC3 staining. Images were taken 24 hours after administration. “5′ppp dsRNA” is also the I/O comprising a dsRNA of two separate RNA strands complexed together comprising SEQ ID NO: 1424 and SEQ ID NO: 1425 (where 5′ppp is located on seq id no 1424). “5′ppp hpRNA” is an I/O comprising a dsRNA SEQ ID NO: 1371 with a 5′ppp (which SEQ ID NO: 1371 forms a hairpin structure).

[0158] FIG. 81A illustrates a zoomed out image of the A20 lymphoma sample that has been microinjected with a peptide-I/O comples of FIG. 37 at lug and 2 ug, PBS, DMXAA, 5′ppp dsRNA+in vivo jet PEI, and 5′ppp hpRNA.

[0159] FIG. 81B illustrates zoomed in images of the PBS region, the 5′ppp hpRNA region, the region in which a peptide-I/O complex of FIG. 37 at the 2 ug dose showed activity, and the region in which a peptide-I/O complex of FIG. 37 at the 1 ug dose showed activity. CC3 staining is shown by white punctate spots.

[0160] FIG. 82 illustrates a radial plot analyis comparing peptide-I/O complexes to free I/Os and a negative control (PBS) at 4 hours and 24 hours post administration.

[0161] FIG. 83 illustrates the fluorescent signal in relative fluorescence units (RFUs) from the PrestoBlue live cell assay 3 days after treating Mo7e cells with culture media conditionedwith HEK293 cell transfected with a SEQ ID NO: 1328 expression vector or HEK293 condition media from non-transfected cells (mock negative control). Untreated Mo7e cells are also included as an additional negative control. Error bars represent Standard Deviation n=3.

[0162] FIG. 84 and FIG. 85 illustrates the activity of a peptide-I/O complex of of FIG. 37 to induce an interferon beta (Ifnß) response in a tumor in vivo using A20 lymphoma cells grown in Female Balbc mice. The A20 lymphoma sample that was microinjected with a peptide-I/O complex of FIG. 37, PBS, DMXAA, 5′ppp dsRNA+in vivo jet PEI, and 5′ppp hpRNA (each of the foregoing as described in FIG. 81).

[0163] FIG. 84 shows a low magnification image of the test sites in the A20 lymphoma tumor after 4 hours, as labeled.

[0164] FIG. 85 shows a high magnification image of the regions where different select test articles wree injected in the A20 lymphoma tumor after 4 hours, as labeled.

[0165] FIG. 86 illustrates the activity of a peptide-I/O complex of of FIG. 37 to induce an interferon beta (Ifnß) response in a tumor in vivo using CT26 colon carcinoma cells grown in Female Balbc mice. The CT26 tumor sample was microinjected with a peptide-I/O complex of FIG. 37, chloroquine, the peptide-I/O complex of FIG. 37 plus chloroquine, or 5′ppp-dsRNA (the dsRNA as described in FIG. 81). The FIG. shows low magnification image of the tumor sample and high magnification images of select test sites in the CT26 colon carcinoma cells after 4 hours, as labeled.

### DETAILED DESCRIPTION

[0166] The present disclosure relates generally to compositions and methods for cancer therapy using the application of an immuno-oncology agent, referred to herein as “I/O” or “I/O agent.” An “I/O” or “I/O agent,” as used herein, is non-limiting and can comprise a single agent, multiple agents, or a complex of agents, with such agents being monomeric, dimer (e.g., homodimeric or heterodimeric), or multimeric (e.g., homomultimeric or heteromultimeric) in structure and with such agents singly, doubly, or multiply complexed, aggregated, modified, fused, linked, or in any combination of the foregoing. In particular, the present disclosure relates to a peptide-immuno-oncology agent complex, referred to herein as a “peptide-I/O complex” for treatment of cancer. In some embodiments, the compositions and methods herein utilize a peptide that homes, targets, is directed to, is retained by, accumulates in, migrates to, is processed by, penetrates and/or binds to tumor cells in combination with an immuno-oncology agent. In some embodiments, the peptide and the peptide-I/O complex can be tumor homing. It is understood that tumor homing can include that the peptide can home, target, be directed to, migrate to, be retained by, accumulate in, or bind to specific regions, tissues, structures, or cells of tumors, and can include accumulation or retention in tumors or cancerouis tissue or cells, selective accumulation or penetration of tumor tissue or tumor cells, or can result in increased or higher levels of peptide, and/or any agent complexed with said peptide, in tumor tissues or cells compared to surrounding tissues or cells. In some embodiments, the peptide and the peptide-I/O complex can be cell-penetrating. In some embodiments, the peptide and the peptide-I/O complex can cross the blood brain barrier (BBB). In some embodiments, the peptide and the peptide-I/O complex be cell penetrating by being taken up by cells and can access intracellular compartments, can be endocytosed, can be pinocytosed, can be translocated across the cell membrane, can cross the blood brain barrier (BBB), or can accumulate in or deliver the peptide-I/O complex or I/O to certain intracellular locations. In some embodiments, the peptide and the peptide-I/O complex can be tumor-homing, and can accumulate in or deliver to certain tumor tissues, cells, cellular compartments, and/or the cytosol. In some embodiments, the peptide and the peptide-I/O complex can also cross the BBB and can be used in the treatment of central nervous system (CNS) cancers including brain tumors, metastatic cancer lesions (e.g., within the CNS), and other brain disorders and diseases. For example, the peptide-I/O complex described herein can cross the BBB into the neuronal parenchyma to deliver therapeutically active molecules to targets of neurological diseases including CNS cancers. In some embodiments, the peptide and the peptide-I/O complex can function with any combination of the above properties and can, thus, be cell penetrating, tumor homing, blood-brain barrier crossing, or any combination thereof. Such properties can be modified, optimized, and tuned into the peptide itself or the peptide-I/O complex, as described herein, depending on the desired treatment or disease. In some embodiments, the peptide-I/O complex and the I/O can stimulate a host immune response, including stimulating any of the therapeutic effects described herein. In some embodiments, the present disclosure provides a tumor-homing peptide-I/O complex, a cell penetrating peptide-I/O complex, a BBB-penetrating peptide-I/O complex, a tumor-homing and cell-penetrating and BBB-penetrating peptide-I/O complex, a tumor-homing and cell penetrating peptide-I/O complex, a cell-penetrating and BBB-penetrating peptide-I/O complex, or a tumor-homing and BBB-penetrating peptide-I/O complex.

[0167] In certain embodiments, a peptide of this disclosure in combination with the I/O allows for localized delivery of the I/O to the tumor microenvironment, tumor tissues, cells, cellular compartments, and/or the cytosol. Such delivery can also comprise tumor homing and/or cell penetration. By utilizing a tumor homing and/or cell penetrating peptide of the present disclosure to deliver an I/O, the concentration of I/O can be increased in the target tumor microenvironment where it can exert its therapeutic activity. An I/O can be quite potent with serious side effects and such off-target effects can limit the use of said I/O in oncology. Use of peptides of this disclosure can advantageously lead to an increase in the therapeutic window for administration of the I/O and in a decrease in toxicity that can result from systemic-non-specific delivery of the I/O without the peptide. In some embodiments, the peptide and the peptide-I/O complex can be cell penetrating by being taken up by cells, such as by endocytosis or pinocytosis, cleaved, and secreted back out into the tumor microenvironment. In some embodiments, the peptide-I/O complex can be cleaved extracellularly or at the cell surface in the tumor microenvironment. In some embodiments, cell penetrating indicates uptake by endosomes only, uptake by endosomes, processing, and secretion, or uptake and delivery to the cytoplasm. In some embodiments, cell penetration can include delivery to any intracellular compartment. In some embodiments, cell penetration can include delivery to a particular intracellular compartment, such as an endosome, a lysosome, the Golgi apparatus, endoplasmic reticulum, cytosol, or nucleus. The potency or activity of the I/O alone or the peptide-I/O complex can be increased after processing or cleavage in the tumor microenvironment or cell, such that the potency of the peptide-I/O complex is lower during systemic transport and higher after processing in the tumor or tumor microenvironment. Solid tumors can be difficult to penetrate with therapeutic agents, such as with large molecules like antibodies. Some large molecules like antibodies can coat the outer part of a tumor but can penetrate only a lower subtherapeutic level inside parts of the tumors. Peptides of this disclosure can penetrate solid tumors. This penetration of solid tumors by peptides of this disclosure can be due to their smaller size, faster off rates, specific binding interactions, a combination thereof, other properties, or a combination thereof, and can thus increase delivery of an I/O into the tumor, throughout the tumor, or to specific regions of the tumor. In some embodiments, any peptide of this disclosure, for example, any one of SEQ ID NO: 1-SEQ ID NO: 1134, SEQ ID NO: 1243-SEQ ID NO: 1262, or SEQ ID NO: 1263-SEQ ID NO: 1316 can be modified (e.g., mutated) to increase the ability to home to a specific target, such as a tumor, a tissue, a cell, a cellular compartment, or any combination thereof. In some embodiments, any peptide of this disclosure, for example, any one of SEQ ID NO: 1-SEQ ID NO: 1134, SEQ ID NO: 1243-SEQ ID NO: 1262, or SEQ ID NO: 1263-SEQ ID NO: 1316 can be modified (e.g., mutated) to increase efficacy in treatment of any cancer. In certain embodiments, a peptide of this disclosure in combination with the I/O can allow for delivery of the I/O to the cytoplasm, or to endosomes, or to other subcellular compartments of cells of the tumor microenvironment, due to the cell penetrating properties of the peptide. The peptide can carry the I/O across the cell membrane into the cytoplasm. For example, the peptide can carry the I/O across the cell membrane to specific locations within the cytoplasm, such as near the endoplasmic reticulum or the Golgi apparatus. In contrast, without a peptide of this disclosure, the I/O may not be able to enter the cell as efficiently or at all. Thus, the peptides of this disclosure can enable the I/O to access its intracellular target and exert its therapeutic effect. In some embodiments, a peptide of the peptide-I/O complex can allow for entry into the cell, processing of the peptide-I/O complex in the cell, or a combination thereof, wherein the I/O can then be displayed on the cell surface or secreted within the tumor microenvironment. In some embodiments, the I/O of the peptide-I/O complex can be inactive or of reduced activity when in the peptide-I/O complex form, but then after the peptide-I/O is processed in the extracellular space or within the cell, the I/O can be released or activated such that it can be more active than when in the peptide-I/O complex form. This can result in an increase in the concentration of activated I/O in the tumor cell, in the tumor microenvironment, or a combination thereof, after administration of the peptide-I/O complex as compared with administration of the I/O alone. Additionally, this can increase the therapeutic window and efficacy of the I/O as a result of administration of the I/O in a peptide-I/O complex compared with administration of the I/O alone. In some embodiments, the peptides of this disclosure can carry the I/O agent across the blood brain barrier and into the CNS, allowing delivery of the I/O agent to the CNS. Tumor homing properties of the peptides of this disclosure can include accumulating in the tumor microenvironment, retention in the tumor microenvironment, presence in the tumor at higher levels than in other tissues, retention within cells of the tumor. The term “tumor” as used herein can refer to a gross mass consisting of cancer cells, stromal cells, blood vessels, and various infiltrating cells.

[0168] In some embodiments, a peptide of the present disclosure and an I/O are delivered together in a complex. This is referred to herein as a “peptide-I/O complex.” This peptide-I/O complex can be formed via direct conjugation, co-formulation, formulation in a delivery vehicle (e.g., a liposome or nanoparticle), or recombinant expression of the peptide and I/O together as a fusion. A peptide-I/O complex can also be held together by noncovalent interactions, such as a high affinity receptor-ligand type interaction. A peptide-I/O complex can home to a specific organ and/or tumor-specific compartments. For example, an I/O of the peptide-I/O complex can access targets in the tumor microenvironment, targets in the brain, and/or targets at the cell surface or in the cytoplasm, endoplasmic reticulum, or Golgi apparatus.

[0169] Exemplary I/Os of the present disclosure include the immuno-oncology agent (I/O) comprising an IL-15 agent, a RIG-I ligand, a 4-1BB ligand, a STING ligand, an MDA5 ligand, a CGAS ligand, a TLR3 ligand, a TLR7/8 ligand, or a TLR9 ligand. An IL-15 agent, a RIG-I ligand, a 4-1BB ligand, a STING ligand, an MDA5 ligand, a CGAS ligand, a TLR3 ligand, a TLR7/8 ligand, or a TLR9 ligand includes agents or ligands with agonist activity, such as those that act as agonists to activate, stimulate or enhance the function or activity of its respective receptor or target. For example, as used herein, a “ligand” or “agent” is meant to encompass any moiety capable of binding or interacting with a target (e.g., a receptor such as IL-15 receptor (IL-15R), RIG-I, 4-1BB, STING, MDA5, CGAS, TLR3, TLR7/8, or TLR9) to modulate the target's activity or function in, e.g., a tumor microenvironment, tumor tissue, cell, cellular compartment, and/or the cytosol. I/Os of the present disclosure that are “ligands” or “agents” modulate various activities on their targets depending on the interaction and desired effect for the an I/O of the peptide-I/O complex. For example, a ligand or agent when binding or interacting with its target can can modulate the activity of the target by acting as an agonist to activate, stimulate or enhance the function of the target, or acting as an antagonist to block, prevent or reduce the function of the target.

[0170] The term “ligand” can be used herein to refer to a broad range of I/Os exhibiting binding activity, for example, exhibiting binding to a receptor, such as IL-15 receptor, RIG-I I, 4-1BB, STING, MDA5, CGAS, TLR3, TLR7/8, or TLR9. Ligands can be agonists or antagonists. For example, a “STING ligand” can bind to STING can be a STING agonist. An agonist can refer to a particular I/O that activates a receptor or target to which it binds. An antagonist can refer to a particular I/O that blocks a natural agonist of a receptor or target or blocks the receptor or target's signal transduction pathway, thereby inhibiting activity.

[0171] Exemplary I/Os of the present disclosure can further include, but are not limited to, cytokines, including, but not limited to, Type I interferons; interferon gamma; interleukin (IL)-2, IL-7, IL-15, IL-21, IL-12, IL-22, IL-23, IL-24, IL-27, IL-28, IL-29, IL-1, IL-18, IL-33; checkpoint inhibitors including, but not limited to, inhibitors of CTLA-4, PD-1, PD-L₁, TIM-3, LAG-3, VISTA, B7-H3, B7-H4, B7S1, galectin 9, CD244, BTLA, CD160, CIS, LIGHT, TIGIT; ligands of pattern recognition receptors (PRRs) including, but not limited to TLR, NLR, ALR, CLR, RLR, RIG-I, MDA5, and STING; molecules that inhibit the macrophage checkpoint CD47, including, but not limited to, SIRPa, which can downregulate CD47 expression at the cell surface of cancer cells or can directly block the CD47-SIRPa interaction; molecules that inhibit the activity of the enzyme indoleamine-2,3-dioxygenase (IDO); molecules that block natural killer (NK) cell checkpoints including, but not limited to, CIS, KIR2DL1-3, KIR3DL1, and CD94/NKG2A; and ligands or other agonists or antagonists of TNF family members including, but not limited to, CD40, 4-1BB, OX40, ICOS, CD27, TL-1A, TRAIL, FAS, and GITR. In some embodiments, the peptide-I/O complex is a peptide of the present disclosure complexed with IL-15/IL-15Ra sushi domain, which can be transpresented. In this case, a peptide can deliver the IL-15/IL-15Ra sushi domain to the tumor microenvironment where the I/O can be active extracellularly or on the cell surface. In some embodiments, the peptide-I/O complex is a cell penetrating peptide, that can also be tumor homing, complexed with a RIG-I ligand (e.g., 5′ppp-RNA, at least 20 bases or 2 fluoropyramidines), a STING ligand (2′-3′ cGAMP or variants), or an MDA5 ligand, any of which can then access cytoplasmic targets and act as an agonist.

[0172] Additional aspects and advantages of the present disclosure will become apparent to those skilled in this art from the following detailed description, wherein illustrative embodiments of the present disclosure are shown and described. As will be realized, the present disclosure is capable of other and different embodiments, and its several details are capable of modifications in various respects, all without departing from the disclosure. Accordingly, the drawings and description are to be regarded as illustrative in nature, and not as restrictive.

[0173] As used herein, the abbreviations for the natural L-enantiomeric amino acids are conventional and are as follows: alanine (A, Ala); arginine (R, Arg); asparagine (N, Asn); aspartic acid (D, Asp); cysteine (C, Cys); glutamic acid (E, Glu); glutamine (Q, Gln); glycine (G, Gly); histidine (H, His); isoleucine (I, Ile); leucine (L, Leu); lysine (K, Lys); methionine (M, Met); phenylalanine (F, Phe); proline (P, Pro); serine (S, Ser); threonine (T, Thr); tryptophan (W, Trp); tyrosine (Y, Tyr); valine (V, Val). Typically, Xaa can indicate any amino acid. In some embodiments, X can be asparagine (N), glutamine (Q), histidine (H), lysine (K), or arginine (R). Abbreviations for other L-enantiomeric amino acids, including non-common proteogenic a-amino acids or natural L-enantiomeric amino acid precursors or internediates, are sometimes conventional and may or may not not have single-letter codes, for example as follows: citrulline (Cit; often designated as X), selenocysteine (U; Sec) and pyrrolysine (O; Pyl).

[0174] Some embodiments of the disclosure contemplate D-amino acid residues of any standard or non-standard amino acid or analogue thereof. When an amino acid sequence is represented as a series of three-letter or one-letter amino acid abbreviations, the left-hand direction is the amino terminal direction and the right-hand direction is the carboxy terminal direction, in accordance with standard usage and convention.

### Peptides

[0175] The present disclosure provides peptides that can comprise or can be derived from cysteine-dense peptides. As used herein, the term “cysteine-dense peptide” can be interchangeable with the terms “knotted peptide,” “knottin,” and “optide,” and cysteine-dense peptides can also be abbreviated as “CDPs.” Hitchins, amongst other disulfide-containing peptides, can also be considered “knotted peptides” for the purposes of this disclosure. Knottins, for example, are a class of cysteine-dense peptides comprising from about 11 to about 80 amino acids in length that are often folded into a compact structure. Knottins and other cysteine-dense peptides are typically assembled into a complex tertiary structure that is characterized by a number of intramolecular disulfide crosslinks and can contain beta strands, an alpha helix, and other secondary structures. The presence of the disulfide bonds can give cysteine-dense peptides remarkable environmental stability, allowing them to withstand extremes of temperature and pH, to resist proteolytic enzymes in the blood stream or digestive tract, and can provide specific biodistribution, pharmacokinetic, binding interactions, cellular processing, or other properties of physiologic and therapeutic value. The peptides disclosed herein can be derived from certain cysteine-dense peptides.

[0176] In some embodiments, cysteine-dense peptides can penetrate tissues due to their compact size. Cysteine-dense peptides can further penetrate solid tumors and can penetrate said solid tumors at higher levels, to a deeper extent, or more thoroughly than other molecules such as antibodies. Cysteine-dense peptides can also cross barriers such as the blood-brain barrier (BBB), the cellular membrane, or other physiological barriers, which may occur due to specific or non-specific binding interactions. Cysteine-dense peptides can be cleared from the circulation, such as more rapidly than an antibody, while accumulating or being retained in other tissues such as tumor tissue or cells. Cysteine-dense peptides can be low in immunogenicity, such as lower than other peptides, proteins, or antibodies, and this can be due to their compact structure and/or resistance to proteases, reducing immune cell processing and presentation. Cysteine-dense peptides can permit mutation of amino acids and of loop regions, while maintaining the compact structure, protease resistance, tumor penetration, or other properties.

[0177] The rigidity of cysteine-dense peptides can also allow them to bind to targets without paying the “entropic penalty” that a floppy peptide accrues upon binding a target. For example, binding is adversely affected by the loss of entropy that occurs when a peptide binds a target to form a complex. Therefore, “entropic penalty” is the adverse effect on binding, and the greater the entropic loss that occurs upon this binding, the greater the “entropic penalty.” Furthermore, unbound molecules that are flexible lose more entropy when forming a complex than molecules that are rigidly structured, because of the loss of flexibility when bound up in a complex. However, rigidity in the unbound molecule also generally increases specificity by limiting the number of complexes that molecule can form.

[0178] The cysteine-dense peptides herein can bind targets with antibody-like affinity. The cysteine-dense peptides can bind Annexin A2, matrix metalloproteinase-2, neuropilin-1, phospholipids, components of lipid rafts, or other targets. Additionally, in some embodiments, cysteine-dense peptides can penetrate into cells. In other embodiments, cysteine-dense peptides exhibit more rapid clearance and cellular uptake compared to other types of molecules.

[0179] A cysteine-dense peptide can comprise disulfide bridges. A cysteine-dense peptide can be a peptide wherein 5% or more of the residues are cysteines forming intramolecular disulfide bonds. A cysteine-dense peptide can be a peptide wherein 10% or more of the residues are cysteines forming intramolecular disulfide bonds. A disulfide-linked peptide can be a drug scaffold. In some embodiments, the disulfide bridges form a knot. A disulfide bridge can be formed between cysteine residues, for example, between cysteines 1 and 4, 2 and 5, or, 3 and 6. In some cases, one disulfide bridge passes through a loop formed by the other two disulfide bridges, for example, to form the inhibitor knot. In other cases, the disulfide bridges can be formed between any two cysteine residues.

[0180] The present disclosure further includes a peptide of any one of SEQ ID NO: 1-SEQ ID NO: 1134, SEQ ID NO: 1243-SEQ ID NO: 1262, or SEQ ID NO: 1263-SEQ ID NO: 1316 that can be used as peptide scaffolds that, e.g., can be used as a starting point for generating additional peptides that can target and home to tumor microenvironments, tumor tissues, cells, cellular compartments, and/or the cytosol. In some embodiments, these scaffolds can be derived from a variety of cysteine-dense peptides. In certain embodiments, cysteine-dense peptides are assembled into a complex tertiary structure that is characterized by a number of intramolecular disulfide crosslinks, and can contain beta strands and other secondary structures such as an alpha helix. For example, a cysteine-dense peptide can include a small disulfide-rich protein characterized by a disulfide through disulfide knot. This knot can be, e.g., obtained when one disulfide bridge crosses the macrocycle formed by two other disulfides and the interconnecting backbone. In some embodiments, a cysteine-dense peptide can include a growth factor cysteine knot or inhibitor cysteine knot. Other possible peptide structures can include a peptide having two parallel helices linked by two disulfide bridges without B-sheets (e.g., hefutoxin).

[0181] A cysteine-dense peptide can comprise at least one amino acid residue in an L configuration. A cysteine-dense peptide can comprise at least one amino acid residue in a D configuration. In some embodiments, a cysteine-dense peptide is at least 11-81 amino acid residues long. In some embodiments, a cysteine-dense peptide is at least 22-63 amino acid residues long. In some embodiments, a cysteine-dense peptide is at least 15-40 amino acid residues long. In other embodiments, a cysteine-dense peptide is at least 11-57 amino acid residues long. In further embodiments, a cysteine-dense peptide is at least 20 amino acid residues long. Moreover, the above embodiments, or active fragments thereof, can be inserted into or fused to other peptides to confer desired properties (e.g., tumor homing, binding, cell penetration, and the like).

[0182] The peptides of the present disclosure can comprise cysteine amino acid residues. In some embodiments, the peptide can have at least 4 cysteine amino acid residues. In some cases, the peptide can have at least 6 cysteine amino acid residues. In other cases, the peptide can have at least 8 cysteine amino acid residues, at least 10 cysteine amino acid residues, at least 12 cysteine amino acid residues, at least 14 cysteine amino acid residues or at least 16 cysteine amino acid residues. In certain embodiments, the peptide can comprise at least 4, at least 5, at least 6, at least 7, at least 8, at least 9, at least 10, at least 11, at least 12, at least 13, at least 14, at least 15, or at least 16 cysteine residues.

[0183] A cysteine-dense peptide can comprise disulfide bridges. A cysteine-dense peptide can be a peptide wherein 5% or more of the residues are cysteines forming intramolecular disulfide bonds. A disulfide-linked peptide can be a drug scaffold. In some embodiments, a peptide of the present disclosure comprises a plurality of disulfide bridges forming an inhibitor knot. In certain embodiments, the disulfide bridges can be formed between cysteine residues of the peptide. For example, the 1st cysteine residue in the sequence can be disulfide bonded with the 4th cysteine residue in the sequence, the 2nd cysteine residue in the sequence can be disulfide bonded with the 5th cysteine residue in the sequence, and/or the 3rd cysteine residue in the sequence can be disulfide bonded with the 6th cysteine residue in the sequence. In alternative embodiments, the disulfide bridges can be formed between any two cysteine residues. In some cases, one disulfide bridge can pass through a loop or ring formed by two other disulfide bridges to form a disulfide through disulfide knot (e.g., an inhibitor knot), also known as a “two-and-through” system. TABLE 1 lists some exemplary peptides according to the present disclosure.

TABLE 1
Peptide Sequences

| SEQ ID NO | Sequence |
|---|---|
| SEQ ID NO: 1 | GSMCIVIPCFTTDHQMARKCDDCCGGKGRGKCYGPQCLCR |
| SEQ ID NO: 2 | GSMCIVIPCFTTDHQMARRCDDCCGGRGRGKCYGPQCLCR |
| SEQ ID NO: 3 | GSMCIVIPCFTTDHQMARRCDDCCGGRGRGRCYGPQCLCR |
| SEQ ID NO: 4 | GSMCIVIPCFTTDHQMARKCDDCCGGRGRGRCYGPQCLCR |
| SEQ ID NO: 5 | GSMCIVIPCFTTDHQMARRCDDCCGGKGRGRCYGPQCLCR |
| SEQ ID NO: 6 | GSMCIVIPCFTTHHRMAENCDICCGGDGRGKCYGPQCLCR |
| SEQ ID NO: 7 | GSMCIVIPCFTTDTQMQERCDRCCGGGGRGKCWGPQCLCI |
| SEQ ID NO: 8 | GSMCMPCFTTDTQMQERCDRCCGGGGRGRCWGPQCLCI |
| SEQ ID NO: 9 | GSMCMPCFTTEQRMAIICDDCCGGFGRGKCYGPQCLCR |
| SEQ ID NO: 10 | GSMCMPCFTTEQRMAIICDDCCGGFGRGRCYGPQCLCR |
| SEQ ID NO: 11 | GSICIPCFTTDHQIARRCDDCCGGRGRGKCYGPQCICR |
| SEQ ID NO: 12 | GSICIPCFTTDHQIARRCDDCCGGRGRGRCYGPQCICR |
| SEQ ID NO: 13 | GSMCMPCFTTDHRMAENCDICCGGDGRGKCYGPQCLCR |
| SEQ ID NO: 14 | GSMCMPCFTTDHRMAENCDICCGGDGRGRCYGPQCLCR |
| SEQ ID NO: 15 | GSMCMPCFTTEQRMAIICDDCCGGFGRGKCYGPQCLCI |
| SEQ ID NO: 16 | GSMCMPCFTTEQRMAIICDDCCGGFGRGRCYGPQCLCI |
| SEQ ID NO: 17 | GSICIPCFTTDHQIARRCDDCCGGRGRGKCYGPQCICI |
| SEQ ID NO: 18 | GSICIPCFTTDHQIARRCDDCCGGRGRGRCYGPQCICI |
| SEQ ID NO: 19 | GSMCMPCFTTDHRMAENCDICCGGDGRGKCYGPQCLCI |
| SEQ ID NO: 20 | GSMCMPCFTTDHRMAENCDICCGGDGRGRCYGPQCLCI |
| SEQ ID NO: 21 | GSMCMPCFTTDTQMQEKCDRCCGGGGRGRCWGPQCLCI |
| SEQ ID NO: 22 | GSMCMPCFTTEQRMAIKCDDCCGGFGRGRCYGPQCLCR |
| SEQ ID NO: 23 | GSICIPCFTTDHQIARKCDDCCGGRGRGRCYGPQCICR |
| SEQ ID NO: 24 | GSMCMPCFTTDHRMAEKCDICCGGDGRGRCYGPQCLCR |
| SEQ ID NO: 25 | GSMCMPCFTTDTQMQERCDRCCGGKGRGRCWGPQCLCI |
| SEQ ID NO: 26 | GSMCMPCFTTEQRMAIICDDCCGGKGRGRCYGPQCLCR |
| SEQ ID NO: 27 | GSICIPCFTTDHQIARRCDDCCGGKGRGRCYGPQCICR |
| SEQ ID NO: 28 | GSMCMPCFTTDHRMAENCDICCGGKGRGRCYGPQCLCR |
| SEQ ID NO: 29 | GSMCMPCFTTHHRMAENCDICCGGDGRGRCYGPQCLCR |
| SEQ ID NO: 30 | GSMCMPCFTTDTQMQERCDRCCGGGGRGRCWGPQCLC |
| SEQ ID NO: 31 | GSMCMPCFTTEQRMAIICDDCCGGFGRGRCYGPQCLC |
| SEQ ID NO: 32 | GSICIPCFTTDHQIARRCDDCCGGRGRGRCYGPQCIC |
| SEQ ID NO: 33 | GSMCMPCFTTDHRMAENCDICCGGDGRGRCYGPQCLC |
| SEQ ID NO: 34 | GSMCMPCFTTDHQMARRCDDCCGGRGRGRCYGPQCLCI |
| SEQ ID NO: 35 | GSACAPCFTTDHQAARRCDDCCGGRGRGKCYGPQCLCR |
| SEQ ID NO: 36 | GSACAPCFTTDHQAARKCDDCCGGKGRGKCYGPQCLCR |
| SEQ ID NO: 37 | GSMCMPCFTTHHRMAENCDICCGGDGRGKCYGPQCLCI |
| SEQ ID NO: 38 | GSMCMPCFTTHHRMAENCDICCGGDGRGKCYGPQCLC |
| SEQ ID NO: 39 | GSMCMPCFTTDHQMARRCDDCCGGRGRGRCYGPQCLC |
| SEQ ID NO: 40 | GSMCMPCFTTHHQMAENCDICCGGDGRGKCYGPQCLCR |
| SEQ ID NO: 41 | GSMCMPCFTTHHRMARNCDICCGGDGRGKCYGPQCLCR |
| SEQ ID NO: 42 | GSMCMPCFTTHHRMAERCDICCGGDGRGKCYGPQCLCR |
| SEQ ID NO: 43 | GSMCMPCFTTHHRMAENCDDCCGGDGRGKCYGPQCLCR |
| SEQ ID NO: 44 | GSRCMPCFTTDHQMARRCDDCCGGRGRGKCYGPQCLCR |
| SEQ ID NO: 45 | GSICIPCFTTDHQIARRCDDCCGGRGRGKCYGPQCLCR |
| SEQ ID NO: 46 | GSMCLPCFTTDHQLARRCDDCCGGRGRGKCYGPQCLCR |
| SEQ ID NO: 47 | GSMCMPCFTTEHQMARRCEECCGGRGRGKCYGPQCLCR |
| SEQ ID NO: 48 | GSMCIPCFTTDHQMARRCEECCGGRGRGKCYGPQCLCR |
| SEQ ID NO: 49 | GSICIPCFTTDHQMARRCDDCCGGRGDGKCYGPQCLCR |
| SEQ ID NO: 50 | GSRCNIPCFTTDHFMARFCDFCCGGRGRGKCYGPQCLCR |
| SEQ ID NO: 51 | GSRCNIPCFTTDHYMARYCDYCCGGRGRGKCYGPQCLCR |
| SEQ ID NO: 52 | GSRCNIPCFTTDHRMARRCDRCCGGRGRGKCYGPQCLCR |
| SEQ ID NO: 53 | GSRCNIPCFTTDHEMARECDECCGGRGRGKCYGPQCLCR |
| SEQ ID NO: 54 | GSRCNIPCFTTDHEIMARHCDHCCGGRGRGKCYGPQCLCR |
| SEQ ID NO: 55 | GSLCLPCFTTHHRLADQCDICCGGDGRGKCYGPQCLCR |
| SEQ ID NO: 56 | GSICIPCFTTEHQIARRCEECCGGRGRGKCYGPQCLCR |
| SEQ ID NO: 57 | GSMCNIPCFTTIYRMABECDECCGGRGRGKCYGPQCLCR |
| SEQ ID NO: 58 | GSMCNIPCFTTGYRMAEYCDICCGGRGRGKCYGPQCLCR |
| SEQ ID NO: 59 | GSMCNIPCFTTHRRMANTCDACCGGRSRGKCYGPQCLCR |
| SEQ ID NO: 60 | GSHCMPCFTTDHQMIRRCDDCCGGGSYGKCDGPQCLCF |
| SEQ ID NO: 61 | GSDCMPCFTTDHRMADHCDICCGGDDRGKCYGPQCLCR |
| SEQ ID NO: 62 | GSMCNIPCFTTDHEMERRCDDCCGIGGGGKCHGPQCLCG |
| SEQ ID NO: 63 | GSMCNIPCFTTSEQMFRRCDDCCGGWGDGKCNGPHCLCR |
| SEQ ID NO: 64 | GSCGPCFTTDHQMEQKCAECCGGIGKCYGPQCLCNR |
| SEQ ID NO: 65 | GSRCGPCFTTDPQTQAKCSECCGRKGGVCKGPQCICGIQY |
| SEQ ID NO: 66 | GSMCNIPCFTTDPNMAKKCRDCCGGNGKCFGPQCLCNR |
| SEQ ID NO: 67 | GSMCNIPCFTTDHNMAKKCNDCCGGYGKCFGPQCLCR |
| SEQ ID NO: 68 | GSRCPPCFTTNPNMEADCRKCCGGRGYCASYQCICPGG |
| SEQ ID NO: 69 | GSMCNIPCFTTDPNMANKCRDCCGGGKKCFGPQCLCNR |
| SEQ ID NO: 70 | GSMKFLYGVILIALFLTVMTATLSEARCGPCFTTDPQTQAKCSEC |
| | CGRKGGVCKGPQCICGIQY |
| SEQ ID NO: 71 | GSMCNIPCFTTRPDMAQQCRACCKGRGKCFGPQCLCGYD |
| SEQ ID NO: 72 | GSMKFLYGIVFIALFLTVMTATLSDAMCNIPCFTTDHNMAKKCRD |
| | CCGGNGKCFGPQCLCNRG |
| SEQ ID NO: 73 | GSMCNIPCFTTDHNMAKKCRDCCGGNGKCFGPQCLCNR |
| SEQ ID NO: 74 | GSMKFLYGIVFITLFLTVMIATHTEAMCMPCFTTRPNMAQQCRD |
| | CCRGRGKCFGPQCLCGYD |
| SEQ ID NO: 75 | GSMKFLYGIVFIALFLTVMIATHTEAMCMPCFTTRPNMAQQCRD |
| | CCRGRGKCFGPQCLCGYD |
| SEQ ID NO: 76 | GSRCKPCFTTDPQMSKKCADCCGGKGKGKCYGPQCLC |
| SEQ ID NO: 77 | GSMKFLYGIVFITLFLTVMIATHTEAAMCNIPCFTTNLNMEQECR |
| | DCCGGTGRCFGPQCLCGYD |
| SEQ ID NO: 78 | GSRCSPCFTTDQQMTKKCYDCCGGKGKGKCYGPQCICAPY |
| SEQ ID NO: 79 | GSCGPCFTTDPYTESKCATCCGGRGKCVGPQCLCNRI |
| SEQ ID NO: 80 | GSTEAMCNIPCFTTDHNMAKKCRDCCGGNGKCFGYQCLCNRG |
| SEQ ID NO: 81 | GSMKFLYGIVFIALFLTVMFATQTDGCGPCFTTDANMARKCREC |
| | CGGIGKCFGPQCLCNRI |
| SEQ ID NO: 82 | GSMKFLYGIVFIALFLTVMFATQTDGCGPCFTTDANMARKCREC |
| | CGGNGKCFGPQCLCNRE |
| SEQ ID NO: 83 | GSMKFLYGTILIAFFLTVMIATHSEARCPPCFTTNPNMEADCRKC |
| | CGGRGYCASYQCICPGG |
| SEQ ID NO: 84 | GSTEAMCNIPCFTTRPDMAQQCRDCCGGNGKCFGYQCLCNRG |
| SEQ ID NO: 85 | GSMKFLYGIVFIALFLTVMIATLTEAMCNIPCFTTRPDMAQQCRD |
| | CCGGNGKCFGYQCLCNRG |
| SEQ ID NO: 86 | GSMKFLYGIVFIALFLTVMIATHTEAMCMPCFTTRPDMAQQCRD |
| | CCGGNGKCFGYQCLCNRG |
| SEQ ID NO: 87 | GSMKFLYGIILIALFLTVMIATHSEARCPNCFTTNPNAEADCKKCC |
| | GNRWGKCAGYQCVCPMK |
| SEQ ID NO: 88 | GSMKFLYGIVFIALFLTGMIATHTEAMCMPCFTTRPDMAQQCRD |
| | CCGGNGKCFGYQCLCNRGRIVIMYT |
| SEQ ID NO: 89 | GSMCMPCFTTRPGMAQQCRDCCGGNGKCFGYQCLCNR |
| SEQ ID NO: 90 | GSMCIPCFTTNPNMAAKCNACCGSRRGSCRGPQCICR |
| SEQ ID NO: 91 | GSMCIPCFTTNPNMAAKCNACCGSRRGSCRGPQCICN |
| SEQ ID NO: 92 | GSMCIPCFTTNPNMAAKCNACCGGNGSCRGPQCICN |
| SEQ ID NO: 93 | GSMCIPCFTTNPNMAAKCNACCGSRGRGSCRGPQCICN |
| SEQ ID NO: 94 | GSMCIPCFTTNPNMAAKCNACCGSRGRGKCRGPQCICN |
| SEQ ID NO: 95 | GSMCIPCFTTDHQMAAKCNACCGSRRGSCRGPQCICN |
| SEQ ID NO: 96 | GSMCIPCFTTNHQMAAKCNACCGSRRGSCRGPQCICN |
| SEQ ID NO: 97 | GSMCIPCFTTNPNMARKCNACCGSRGRGSCRGPQCICN |
| SEQ ID NO: 98 | GSMCIPCFTTNPNMAAKCNACCGGKGRGSCRGPQCICN |
| SEQ ID NO: 99 | GSMCIPCFTTNPNMAAKCNACCGSRRGSCFGPQCICN |
| SEQ ID NO: 100 | GSMCIPCFTTNPNMAAKCNACCGSRGRGKCFGPQCICN |
| SEQ ID NO: 101 | GSMCIPCFTTNPNMAAKCNACCGSRGRGSCFGPQCICN |
| SEQ ID NO: 102 | GSMCIPCFTTNPNMAAKCNACCGSRGRGSCYGPQCICN |
| SEQ ID NO: 103 | GSMCIPCFTTNPNMAAKCDACCGSRRGSCRGPQCICN |
| SEQ ID NO: 104 | GSMCIPCFTTNHQMAAKCDACCGSRRGSCRGPQCICN |
| SEQ ID NO: 105 | GSMCIPCFTTNHNMAAKCDACCGGRGRGSCRGPQCICN |
| SEQ ID NO: 106 | GSMCIPCFTTNPNMAAKCDACCGSRGRGSCRGPQCICN |
| SEQ ID NO: 107 | GSMCIPCFTTNPNMAAKCDACCGGKGRGSCRGPQCICN |
| SEQ ID NO: 108 | GSMCIPCFTTNHNMAAKCDACCGSRGRGSCRGPQCICN |
| SEQ ID NO: 109 | GSMCIPCFTTNPNMAAKCRDCCGGRGSCRGPQCICN |
| SEQ ID NO: 110 | GSMCMPCFTTNPNMAAKCDDCCGSRGRGSCRGPQCICN |
| SEQ ID NO: 111 | GSMCIPCFTTNPNMAARCNACCGSRRGSCRGPQCIC |
| SEQ ID NO: 112 | GSMCIPCFTTNPNMAAKCNACCGSRRGSCRGPQCICI |
| SEQ ID NO: 113 | GSMCMPCFTTDHQMARACDDCCGGKGRGKCYGPQCLCR |
| SEQ ID NO: 114 | GSMCMPCFTTDHQMARRCDDCCGGKGRGKCYGPQCLCR |
| SEQ ID NO: 115 | GSMCMPCFTTDHQMARKCDDCCGGAGRGKCYGPQCLCR |
| SEQ ID NO: 116 | GSMCMPCFTTDHQMARACDDCCGGAGRGKCYGPQCLCR |
| SEQ ID NO: 117 | GSMCMPCFTTDHQMARRCDDCCGGAGRGKCYGPQCLCR |
| SEQ ID NO: 118 | GSMCMPCFTTDHQMARKCDDCCGGRGRGKCYGPQCLCR |
| SEQ ID NO: 119 | GSMCMPCFTTDHQMARACDDCCGGRGRGKCYGPQCLCR |
| SEQ ID NO: 120 | GSMCMPCFTTDHQMARKCDDCCGGKGRGACYGPQCLCR |
| SEQ ID NO: 121 | GSMCMPCFTTDHQMARACDDCCGGKGRGACYGPQCLCR |
| SEQ ID NO: 122 | GSMCMPCFTTDHQMARRCDDCCGGKGRGACYGPQCLCR |
| SEQ ID NO: 123 | GSMCMPCFTTDHQMARKCDDCCGGAGRGACYGPQCLCR |
| SEQ ID NO: 124 | GSMCMPCFTTDHQMARACDDCCGGAGRGACYGPQCLCR |
| SEQ ID NO: 125 | GSMCMPCFTTDHQMARRCDDCCGGAGRGACYGPQCLCR |
| SEQ ID NO: 126 | GSMCMPCFTTDHQMARKCDDCCGGRGRGACYGPQCLCR |
| SEQ ID NO: 127 | GSMCMPCFTTDHQMARACDDCCGGRGRGACYGPQCLCR |
| SEQ ID NO: 128 | GSMCMPCFTTDHQMARRCDDCCGGRGRGACYGPQCLCR |
| SEQ ID NO: 129 | GSMCMPCFTTDHQMARKCDDCCGGKGRGRCYGPQCLCR |
| SEQ ID NO: 130 | GSMCMPCFTTDHQMARACDDCCGGKGRGRCYGPQCLCR |
| SEQ ID NO: 131 | GSMCMPCFTTDHQMARKCDDCCGGAGRGRCYGPQCLCR |
| SEQ ID NO: 132 | GSMCMPCFTTDHQMARACDDCCGGAGRGRCYGPQCLCR |
| SEQ ID NO: 133 | GSMCMPCFTTDHQMARRCDDCCGGAGRGRCYGPQCLCR |
| SEQ ID NO: 134 | GSMCMPCFTTDHQMARACDDCCGGRGRGRCYGPQCLCR |
| SEQ ID NO: 135 | GSKCNIPCFTTDHQMARRCDDCCGGRGRGRCYGPQCLCR |
| SEQ ID NO: 136 | GSACAPCFTTDHQAARRCDDCCGGRGRGRCYGPQCLCR |
| SEQ ID NO: 137 | GSKCAPCFTTDHQAARRCDDCCGGRGRGRCYGPQCLCR |
| SEQ ID NO: 138 | GSMCMPCFTTDHQMAR(Cit)CDDCCGG(Cit)GRGKCYGPQCLCR |
| SEQ ID NO: 139 | GSMCMPCFTTDHQMAR(Cit)CDDCCGG(Cit)GRG(Cit)CYGPQCLC |
| | R |
| SEQ ID NO: 140 | GSKCNIPCFTTDHQMAR(Cit)CDDCCGG(Cit)GRG(Cit)CYGPQCLC |
| | R |
| SEQ ID NO: 141 | GSACAPCFTTDHQAAR(Cit)CDDCCGG(Cit)GRGKCYGPQCLCR |
| SEQ ID NO: 142 | GSACAPCFTTDHQAAR(Cit)CDDCCGG(Cit)GRG(Cit)CYGPQCLCR |
| SEQ ID NO: 143 | GSKCAPCFTTDHQAAR(Cit)CDDCCGG(Cit)GRG(Cit)CYGPQCLCR |
| SEQ ID NO: 144 | GSMCMPCFTTDHQMARKCDDCCGGKGRGKCYGPQCLCRGAGA |
| | AGG |
| SEQ ID NO: 145 | GSMCMPCFTTDHQMARACDDCCGGKGRGKCYGPQCLCRGAGA |
| | AGG |
| SEQ ID NO: 146 | GSMCMPCFTTDHQMARRCDDCCGGKGRGKCYGPQCLCRGAGA |
| | AGG |
| SEQ ID NO: 147 | GSMCMPCFTTDHQMARKCDDCCGGAGRGKCYGPQCLCRGAGA |
| | AGG |
| SEQ ID NO: 148 | GSMCMPCFTTDHQMARACDDCCGGAGRGKCYGPQCLCRGAGA |
| | AGG |
| SEQ ID NO: 149 | GSMCMPCFTTDHQMARRCDDCCGGAGRGKCYGPQCLCRGAGA |
| | AGG |
| SEQ ID NO: 150 | GSMCMPCFTTDHQMARKCDDCCGGRGRGKCYGPQCLCRGAGA |
| | AGG |
| SEQ ID NO: 151 | GSMCMPCFTTDHQMARACDDCCGGRGRGKCYGPQCLCRGAGA |
| | AGG |
| SEQ ID NO: 152 | GSMCMPCFTTDHQMARRCDDCCGGRGRGKCYGPQCLCRGAGA |
| | AGG |
| SEQ ID NO: 153 | GSMCMPCFTTDHQMARKCDDCCGGKGRGACYGPQCLCRGAGA |
| | AGG |
| SEQ ID NO: 154 | GSMCMPCFTTDHQMARACDDCCGGKGRGACYGPQCLCRGAGA |
| | AGG |
| SEQ ID NO: 155 | GSMCMPCFTTDHQMARRCDDCCGGKGRGACYGPQCLCRGAGA |
| | AGG |
| SEQ ID NO: 156 | GSMCMPCFTTDHQMARKCDDCCGGAGRGACYGPQCLCRGAGA |
| | AGG |
| SEQ ID NO: 157 | GSMCMPCFTTDHQMARACDDCCGGAGRGACYGPQCLCRGAGA |
| | AGG |
| SEQ ID NO: 158 | GSMCMPCFTTDHQMARRCDDCCGGAGRGACYGPQCLCRGAGA |
| | AGG |
| SEQ ID NO: 159 | GSMCMPCFTTDHQMARKCDDCCGGRGRGACYGPQCLCRGAGA |
| | AGG |
| SEQ ID NO: 160 | GSMCMPCFTTDHQMARACDDCCGGRGRGACYGPQCLCRGAGA |
| | AGG |
| SEQ ID NO: 161 | GSMCMPCFTTDHQMARRCDDCCGGRGRGACYGPQCLCRGAGA |
| | AGG |
| SEQ ID NO: 162 | GSMCMPCFTTDHQMARKCDDCCGGKGRGRCYGPQCLCRGAGA |
| | AGG |
| SEQ ID NO: 163 | GSMCMPCFTTDHQMARACDDCCGGKGRGRCYGPQCLCRGAGA |
| | AGG |
| SEQ ID NO: 164 | GSMCMPCFTTDHQMARRCDDCCGGKGRGRCYGPQCLCRGAGA |
| | AGG |
| SEQ ID NO: 165 | GSMCMPCFTTDHQMARKCDDCCGGAGRGRCYGPQCLCRGAGA |
| | AGG |
| SEQ ID NO: 166 | GSMCMPCFTTDHQMARACDDCCGGAGRGRCYGPQCLCRGAGA |
| | AGG |
| SEQ ID NO: 167 | GSMCMPCFTTDHQMARRCDDCCGGAGRGRCYGPQCLCRGAGA |
| | AGG |
| SEQ ID NO: 168 | GSMCMPCFTTDHQMARKCDDCCGGRGRGRCYGPQCLCRGAGA |
| | AGG |
| SEQ ID NO: 169 | GSMCMPCFTTDHQMARACDDCCGGRGRGRCYGPQCLCRGAGA |
| | AGG |
| SEQ ID NO: 170 | GSMCMPCFTTDHQMARRCDDCCGGRGRGRCYGPQCLCRGAGA |
| | AGG |
| SEQ ID NO: 171 | GSKCNIPCFTTDHQMARRCDDCCGGRGRGRCYGPQCLCRGAGA |
| | AGG |
| SEQ ID NO: 172 | GSACAPCFTTDHQAARRCDDCCGGRGRGRCYGPQCLCRGAGAA |
| | GG |
| SEQ ID NO: 173 | GSKCAPCFTTDHQAARRCDDCCGGRGRGRCYGPQCLCRGAGAA |
| | GG |
| SEQ ID NO: 174 | GSMCMPCFTTDHQMAR(Cit)CDDCCGG(Cit)GRGKCYGPQCLCRG |
| | AGAAGG |
| SEQ ID NO: 175 | GSMCMPCFTTDHQMAR(Cit)CDDCCGG(Cit)GRG(Cit)CYGPQCLC |
| | RGAGAAGG |
| SEQ ID NO: 176 | GSKCNIPCFTTDHQMAR(Cit)CDDCCGG(Cit)GRG(Cit)CYGPQCLC |
| | RGAGAAGG |
| SEQ ID NO: 177 | GSACAPCFTTDHQAAR(Cit)CDDCCGG(Cit)GRGKCYGPQCLCRG |
| | AGAAGG |
| SEQ ID NO: 178 | GSACAPCFTTDHQAAR(Cit)CDDCCGG(Cit)GRG(Cit)CYGPQCLCR |
| | GAGAAGG |
| SEQ ID NO: 179 | GSKCAPCFTTDHQAAR(Cit)CDDCCGG(Cit)GRG(Cit)CYGPQCLCR |
| | GAGAAGG |
| SEQ ID NO: 180 | GSMCMPCFTTDHQMVRKCDDCCGGKGRGKCYGPQCLCR |
| SEQ ID NO: 181 | GSMCMPCFTTDHQMVRVCDDCCGGKGRGKCYGPQCLCR |
| SEQ ID NO: 182 | GSMCMPCFTTDHQMVRRCDDCCGGKGRGKCYGPQCLCR |
| SEQ ID NO: 183 | GSMCMPCFTTDHQMVRKCDDCCGGVGRGKCYGPQCLCR |
| SEQ ID NO: 184 | GSMCMPCFTTDHQMVRVCDDCCGGVGRGKCYGPQCLCR |
| SEQ ID NO: 185 | GSMCMPCFTTDHQMVRRCDDCCGGVGRGKCYGPQCLCR |
| SEQ ID NO: 186 | GSMCMPCFTTDHQMVRKCDDCCGGRGRGKCYGPQCLCR |
| SEQ ID NO: 187 | GSMCMPCFTTDHQMVRVCDDCCGGRGRGKCYGPQCLCR |
| SEQ ID NO: 188 | GSMCMPCFTTDHQMVRRCDDCCGGRGRGKCYGPQCLCR |
| SEQ ID NO: 189 | GSMCMPCFTTDHQMVRKCDDCCGGKGRGVCYGPQCLCR |
| SEQ ID NO: 190 | GSMCMPCFTTDHQMVRVCDDCCGGKGRGVCYGPQCLCR |
| SEQ ID NO: 191 | GSMCMPCFTTDHQMVRRCDDCCGGKGRGVCYGPQCLCR |
| SEQ ID NO: 192 | GSMCMPCFTTDHQMVRKCDDCCGGVGRGVCYGPQCLCR |
| SEQ ID NO: 193 | GSMCMPCFTTDHQMVRVCDDCCGGVGRGVCYGPQCLCR |
| SEQ ID NO: 194 | GSMCMPCFTTDHQMVRRCDDCCGGVGRGVCYGPQCLCR |
| SEQ ID NO: 195 | GSMCMPCFTTDHQMVRKCDDCCGGRGRGVCYGPQCLCR |
| SEQ ID NO: 196 | GSMCMPCFTTDHQMVRVCDDCCGGRGRGVCYGPQCLCR |
| SEQ ID NO: 197 | GSMCMPCFTTDHQMVRRCDDCCGGRGRGVCYGPQCLCR |
| SEQ ID NO: 198 | GSMCMPCFTTDHQMVRKCDDCCGGKGRGRCYGPQCLCR |
| SEQ ID NO: 199 | GSMCMPCFTTDHQMVRVCDDCCGGKGRGRCYGPQCLCR |
| SEQ ID NO: 200 | GSMCMPCFTTDHQMVRRCDDCCGGKGRGRCYGPQCLCR |
| SEQ ID NO: 201 | GSMCMPCFTTDHQMVRKCDDCCGGVGRGRCYGPQCLCR |
| SEQ ID NO: 202 | GSMCMPCFTTDHQMVRVCDDCCGGVGRGRCYGPQCLCR |
| SEQ ID NO: 203 | GSMCMPCFTTDHQMVRRCDDCCGGVGRGRCYGPQCLCR |
| SEQ ID NO: 204 | GSMCMPCFTTDHQMVRKCDDCCGGRGRGRCYGPQCLCR |
| SEQ ID NO: 205 | GSMCMPCFTTDHQMVRVCDDCCGGRGRGRCYGPQCLCR |
| SEQ ID NO: 206 | GSMCMPCFTTDHQMVRRCDDCCGGRGRGRCYGPQCLCR |
| SEQ ID NO: 207 | GSKCNIPCFTTDHQMVRRCDDCCGGRGRGRCYGPQCLCR |
| SEQ ID NO: 208 | GSVCVPCFTTDHQVVRRCDDCCGGRGRGRCYGPQCLCR |
| SEQ ID NO: 209 | GSKCVPCFTTDHQVVRRCDDCCGGRGRGRCYGPQCLCR |
| SEQ ID NO: 210 | GSMCMPCFTTDHQMVR(Cit)CDDCCGG(Cit)GRGKCYGPQCLCR |
| SEQ ID NO: 211 | GSMCMPCFTTDHQMVR(Cit)CDDCCGG(Cit)GRG(Cit)CYGPQCLC |
| | R |
| SEQ ID NO: 212 | GSKCNIPCFTTDHQMVR(Cit)CDDCCGG(Cit)GRG(Cit)CYGPQCLC |
| | R |
| SEQ ID NO: 213 | GSVCVPCFTTDHQVVR(Cit)CDDCCGG(Cit)GRGKCYGPQCLCR |
| SEQ ID NO: 214 | GSVCVPCFTTDHQVVR(Cit)CDDCCGG(Cit)GRG(Cit)CYGPQCLCR |
| SEQ ID NO: 215 | GSKCVPCFTTDHQVVR(Cit)CDDCCGG(Cit)GRG(Cit)CYGPQCLCR |
| SEQ ID NO: 216 | GSMCMPCFTTDHQMVRKCDDCCGGKGRGKCYGPQCLCRGAGA |
| | AGG |
| SEQ ID NO: 217 | GSMCMPCFTTDHQMVRVCDDCCGGKGRGKCYGPQCLCRGAGA |
| | AGG |
| SEQ ID NO: 218 | GSMCMPCFTTDHQMVRRCDDCCGGKGRGKCYGPQCLCRGAGA |
| | AGG |
| SEQ ID NO: 219 | GSMCMPCFTTDHQMVRKCDDCCGGVGRGKCYGPQCLCRGAGA |
| | AGG |
| SEQ ID NO: 220 | GSMCMPCFTTDHQMVRVCDDCCGGVGRGKCYGPQCLCRGAGA |
| | AGG |
| SEQ ID NO: 221 | GSMCMPCFTTDHQMVRRCDDCCGGVGRGKCYGPQCLCRGAGA |
| | AGG |
| SEQ ID NO: 222 | GSMCMPCFTTDHQMVRKCDDCCGGRGRGKCYGPQCLCRGAGA |
| | AGG |
| SEQ ID NO: 223 | GSMCMPCFTTDHQMVRVCDDCCGGRGRGKCYGPQCLCRGAGA |
| | AGG |
| SEQ ID NO: 224 | GSMCMPCFTTDHQMVRRCDDCCGGRGRGKCYGPQCLCRGAGA |
| | AGG |
| SEQ ID NO: 225 | GSMCMPCFTTDHQMVRKCDDCCGGKGRGVCYGPQCLCRGAGA |
| | AGG |
| SEQ ID NO: 226 | GSMCMPCFTTDHQMVRVCDDCCGGKGRGVCYGPQCLCRGAGA |
| | AGG |
| SEQ ID NO: 227 | GSMCMPCFTTDHQMVRRCDDCCGGKGRGVCYGPQCLCRGAGA |
| | AGG |
| SEQ ID NO: 228 | GSMCMPCFTTDHQMVRKCDDCCGGVGRGVCYGPQCLCRGAGA |
| | AGG |
| SEQ ID NO: 229 | GSMCMPCFTTDHQMVRVCDDCCGGVGRGVCYGPQCLCRGAGA |
| | AGG |
| SEQ ID NO: 230 | GSMCMPCFTTDHQMVRRCDDCCGGVGRGVCYGPQCLCRGAGA |
| | AGG |
| SEQ ID NO: 231 | GSMCMPCFTTDHQMVRKCDDCCGGRGRGVCYGPQCLCRGAGA |
| | AGG |
| SEQ ID NO: 232 | GSMCMPCFTTDHQMVRVCDDCCGGRGRGVCYGPQCLCRGAGA |
| | AGG |
| SEQ ID NO: 233 | GSMCMPCFTTDHQMVRRCDDCCGGRGRGVCYGPQCLCRGAGA |
| | AGG |
| SEQ ID NO: 234 | GSMCMPCFTTDHQMVRKCDDCCGGKGRGRCYGPQCLCRGAGA |
| | AGG |
| SEQ ID NO: 235 | GSMCMPCFTTDHQMVRVCDDCCGGKGRGRCYGPQCLCRGAGA |
| | AGG |
| SEQ ID NO: 236 | GSMCMPCFTTDHQMVRRCDDCCGGKGRGRCYGPQCLCRGAGA |
| | AGG |
| SEQ ID NO: 237 | GSMCMPCFTTDHQMVRKCDDCCGGVGRGRCYGPQCLCRGAGA |
| | AGG |
| SEQ ID NO: 238 | GSMCMPCFTTDHQMVRVCDDCCGGVGRGRCYGPQCLCRGAGA |
| | AGG |
| SEQ ID NO: 239 | GSMCMPCFTTDHQMVRRCDDCCGGVGRGRCYGPQCLCRGAGA |
| | AGG |
| SEQ ID NO: 240 | GSMCMPCFTTDHQMVRKCDDCCGGRGRGRCYGPQCLCRGAGA |
| | AGG |
| SEQ ID NO: 241 | GSMCMPCFTTDHQMVRVCDDCCGGRGRGRCYGPQCLCRGAGA |
| | AGG |
| SEQ ID NO: 242 | GSMCMPCFTTDHQMVRRCDDCCGGRGRGRCYGPQCLCRGAGA |
| | AGG |
| SEQ ID NO: 243 | GSKCMPCFTTDHQMVRRCDDCCGGRGRGRCYGPQCLCRGAGA |
| | AGG |
| SEQ ID NO: 244 | GSVCVPCFTTDHQVVRRCDDCCGGRGRGRCYGPQCLCRGAGAA |
| | GG |
| SEQ ID NO: 245 | GSKCVPCFTTDHQVVRRCDDCCGGRGRGRCYGPQCLCRGAGAA |
| | GG |
| SEQ ID NO: 246 | GSMCMPCFTTDHQMVR(Cit)CDDCCGG(Cit)GRGKCYGPQCLCRG |
| | AGAAGG |
| SEQ ID NO: 247 | GSMCMPCFTTDHQMVR(Cit)CDDCCGG(Cit)GRG(Cit)CYGPQCLC |
| | RGAGAAGG |
| SEQ ID NO: 248 | GSKCNIPCFTTDHQMVR(Cit)CDDCCGG(Cit)GRG(Cit)CYGPQCLC |
| | RGAGAAGG |
| SEQ ID NO: 249 | GSVCVPCFTTDHQVVR(Cit)CDDCCGG(Cit)GRGKCYGPQCLCRG |
| | AGAAGG |
| SEQ ID NO: 250 | GSVCVPCFTTDHQVVR(Cit)CDDCCGG(Cit)GRG(Cit)CYGPQCLCR |
| | GAGAAGG |
| SEQ ID NO: 251 | GSKCVPCFTTDHQVVR(Cit)CDDCCGG(Cit)GRG(Cit)CYGPQCLCR |
| | GAGAAGG |
| SEQ ID NO: 252 | GSMCMPCFTTDHQMLRKCDDCCGGKGRGKCYGPQCLCR |
| SEQ ID NO: 253 | GSMCMPCFTTDHQMLRLCDDCCGGKGRGKCYGPQCLCR |
| SEQ ID NO: 254 | GSMCMPCFTTDHQMLRRCDDCCGGKGRGKCYGPQCLCR |
| SEQ ID NO: 255 | GSMCMPCFTTDHQMLRKCDDCCGGLGRGKCYGPQCLCR |
| SEQ ID NO: 256 | GSMCMPCFTTDHQMLRLCDDCCGGLGRGKCYGPQCLCR |
| SEQ ID NO: 257 | GSMCMPCFTTDHQMLRRCDDCCGGLGRGKCYGPQCLCR |
| SEQ ID NO: 258 | GSMCMPCFTTDHQMLRKCDDCCGGRGRGKCYGPQCLCR |
| SEQ ID NO: 259 | GSMCMPCFTTDHQMLRLCDDCCGGRGRGKCYGPQCLCR |
| SEQ ID NO: 260 | GSMCMPCFTTDHQMLRRCDDCCGGRGRGKCYGPQCLCR |
| SEQ ID NO: 261 | GSMCMPCFTTDHQMLRKCDDCCGGKGRGLCYGPQCLCR |
| SEQ ID NO: 262 | GSMCMPCFTTDHQMLRLCDDCCGGKGRGLCYGPQCLCR |
| SEQ ID NO: 263 | GSMCMPCFTTDHQMLRRCDDCCGGKGRGLCYGPQCLCR |
| SEQ ID NO: 264 | GSMCMPCFTTDHQMLRKCDDCCGGLGRGLCYGPQCLCR |
| SEQ ID NO: 265 | GSMCMPCFTTDHQMLRLCDDCCGGLGRGLCYGPQCLCR |
| SEQ ID NO: 266 | GSMCMPCFTTDHQMLRRCDDCCGGLGRGLCYGPQCLCR |
| SEQ ID NO: 267 | GSMCMPCFTTDHQMLRKCDDCCGGRGRGLCYGPQCLCR |
| SEQ ID NO: 268 | GSMCMPCFTTDHQMLRLCDDCCGGRGRGLCYGPQCLCR |
| SEQ ID NO: 269 | GSMCMPCFTTDHQMLRRCDDCCGGRGRGLCYGPQCLCR |
| SEQ ID NO: 270 | GSMCMPCFTTDHQMLRKCDDCCGGKGRGRCYGPQCLCR |
| SEQ ID NO: 271 | GSMCMPCFTTDHQMLRLCDDCCGGKGRGRCYGPQCLCR |
| SEQ ID NO: 272 | GSMCMPCFTTDHQMLRRCDDCCGGKGRGRCYGPQCLCR |
| SEQ ID NO: 273 | GSMCMPCFTTDHQMLRKCDDCCGGLGRGRCYGPQCLCR |
| SEQ ID NO: 274 | GSMCMPCFTTDHQMLRLCDDCCGGLGRGRCYGPQCLCR |
| SEQ ID NO: 275 | GSMCMPCFTTDHQMLRRCDDCCGGLGRGRCYGPQCLCR |
| SEQ ID NO: 276 | GSMCMPCFTTDHQMLRKCDDCCGGRGRGRCYGPQCLCR |
| SEQ ID NO: 277 | GSMCMPCFTTDHQMLRLCDDCCGGRGRGRCYGPQCLCR |
| SEQ ID NO: 278 | GSMCMPCFTTDHQMLRRCDDCCGGRGRGRCYGPQCLCR |
| SEQ ID NO: 279 | GSKCNIPCFTTDHQMLRRCDDCCGGRGRGRCYGPQCLCR |
| SEQ ID NO: 280 | GSLCLPCFTTDHQLLRRCDDCCGGRGRGRCYGPQCLCR |
| SEQ ID NO: 281 | GSKCLPCFTTDHQLLRRCDDCCGGRGRGRCYGPQCLCR |
| SEQ ID NO: 282 | GSMCMPCFTTDHQMLR(Cit)CDDCCGG(Cit)GRGKCYGPQCLCR |
| SEQ ID NO: 283 | GSMCMPCFTTDHQMLR(Cit)CDDCCGG(Cit)GRG(Cit)CYGPQCLC |
| | R |
| SEQ ID NO: 284 | GSKCNIPCFTTDHQMLR(Cit)CDDCCGG(Cit)GRG(Cit)CYGPQCLC |
| | R |
| SEQ ID NO: 285 | GSLCLPCFTTDHQLLR(Cit)CDDCCGG(Cit)GRGKCYGPQCLCR |
| SEQ ID NO: 286 | GSLCLPCFTTDHQLLR(Cit)CDDCCGG(Cit)GRG(Cit)CYGPQCLCR |
| SEQ ID NO: 287 | GSKCLPCFTTDHQLLR(Cit)CDDCCGG(Cit)GRG(Cit)CYGPQCLCR |
| SEQ ID NO: 288 | GSMCMPCFTTDHQMLRKCDDCCGGKGRGKCYGPQCLCRGAGA |
| | AGG |
| SEQ ID NO: 289 | GSMCMPCFTTDHQMLRLCDDCCGGKGRGKCYGPQCLCRGAGA |
| | AGG |
| SEQ ID NO: 290 | GSMCMPCFTTDHQMLRRCDDCCGGKGRGKCYGPQCLCRGAGA |
| | AGG |
| SEQ ID NO: 291 | GSMCMPCFTTDHQMLRKCDDCCGGLGRGKCYGPQCLCRGAGA |
| | AGG |
| SEQ ID NO: 292 | GSMCMPCFTTDHQMLRLCDDCCGGLGRGKCYGPQCLCRGAGA |
| | AGG |
| SEQ ID NO: 293 | GSMCMPCFTTDHQMLRRCDDCCGGLGRGKCYGPQCLCRGAGA |
| | AGG |
| SEQ ID NO: 294 | GSMCMPCFTTDHQMLRKCDDCCGGRGRGKCYGPQCLCRGAGA |
| | AGG |
| SEQ ID NO: 295 | GSMCMPCFTTDHQMLRLCDDCCGGRGRGKCYGPQCLCRGAGA |
| | AGG |
| SEQ ID NO: 296 | GSMCMPCFTTDHQMLRRCDDCCGGRGRGKCYGPQCLCRGAGA |
| | AGG |
| SEQ ID NO: 297 | GSMCMPCFTTDHQMLRKCDDCCGGKGRGLCYGPQCLCRGAGA |
| | AGG |
| SEQ ID NO: 298 | GSMCMPCFTTDHQMLRLCDDCCGGKGRGLCYGPQCLCRGAGA |
| | AGG |
| SEQ ID NO: 299 | GSMCMPCFTTDHQMLRRCDDCCGGKGRGLCYGPQCLCRGAGA |
| | AGG |
| SEQ ID NO: 300 | GSMCMPCFTTDHQMLRKCDDCCGGLGRGLCYGPQCLCRGAGA |
| | AGG |
| SEQ ID NO: 301 | GSMCMPCFTTDHQMLRLCDDCCGGLGRGLCYGPQCLCRGAGA |
| | AGG |
| SEQ ID NO: 302 | GSMCMPCFTTDHQMLRRCDDCCGGLGRGLCYGPQCLCRGAGA |
| | AGG |
| SEQ ID NO: 303 | GSMCMPCFTTDHQMLRKCDDCCGGRGRGLCYGPQCLCRGAGA |
| | AGG |
| SEQ ID NO: 304 | GSMCMPCFTTDHQMLRLCDDCCGGRGRGLCYGPQCLCRGAGA |
| | AGG |
| SEQ ID NO: 305 | GSMCMPCFTTDHQMLRRCDDCCGGRGRGLCYGPQCLCRGAGA |
| | AGG |
| SEQ ID NO: 306 | GSMCMPCFTTDHQMLRKCDDCCGGKGRGRCYGPQCLCRGAGA |
| | AGG |
| SEQ ID NO: 307 | GSMCMPCFTTDHQMLRLCDDCCGGKGRGRCYGPQCLCRGAGA |
| | AGG |
| SEQ ID NO: 308 | GSMCMPCFTTDHQMLRRCDDCCGGKGRGRCYGPQCLCRGAGA |
| | AGG |
| SEQ ID NO: 309 | GSMCMPCFTTDHQMLRKCDDCCGGLGRGRCYGPQCLCRGAGA |
| | AGG |
| SEQ ID NO: 310 | GSMCMPCFTTDHQMLRLCDDCCGGLGRGRCYGPQCLCRGAGA |
| | AGG |
| SEQ ID NO: 311 | GSMCMPCFTTDHQMLRRCDDCCGGLGRGRCYGPQCLCRGAGA |
| | AGG |
| SEQ ID NO: 312 | GSMCMPCFTTDHQMLRKCDDCCGGRGRGRCYGPQCLCRGAGA |
| | AGG |
| SEQ ID NO: 313 | GSMCMPCFTTDHQMLRLCDDCCGGRGRGRCYGPQCLCRGAGA |
| | AGG |
| SEQ ID NO: 314 | GSMCMPCFTTDHQMLRRCDDCCGGRGRGRCYGPQCLCRGAGA |
| | AGG |
| SEQ ID NO: 315 | GSKCNIPCFTTDHQMLRRCDDCCGGRGRGRCYGPQCLCRGAGA |
| | AGG |
| SEQ ID NO: 316 | GSLCLPCFTTDHQLLRRCDDCCGGRGRGRCYGPQCLCRGAGAA |
| | GG |
| SEQ ID NO: 317 | GSKCLPCFTTDHQLLRRCDDCCGGRGRGRCYGPQCLCRGAGAA |
| | GG |
| SEQ ID NO: 318 | GSMCMPCFTTDHQMLR(Cit)CDDCCGG(Cit)GRGKCYGPQCLCRG |
| | AGAAGG |
| SEQ ID NO: 319 | GSMCMPCFTTDHQMLR(Cit)CDDCCGG(Cit)GRG(Cit)CYGPQCLC |
| | RGAGAAGG |
| SEQ ID NO: 320 | GSKCNIPCFTTDHQMLR(Cit)CDDCCGG(Cit)GRG(Cit)CYGPQCLC |
| | RGAGAAGG |
| SEQ ID NO: 321 | GSLCLPCFTTDHQLLR(Cit)CDDCCGG(Cit)GRGKCYGPQCLCRGA |
| | GAAGG |
| SEQ ID NO: 322 | GSLCLPCFTTDHQLLR(Cit)CDDCCGG(Cit)GRG(Cit)CYGPQCLCR |
| | GAGAAGG |
| SEQ ID NO: 323 | GSKCLPCFTTDHQLLR(Cit)CDDCCGG(Cit)GRG(Cit)CYGPQCLCR |
| | GAGAAGG |
| SEQ ID NO: 324 | GSGCGPCFTTDHQGARKCDDCCGGKGRGKCYGPQCLCR |
| SEQ ID NO: 325 | GSGCGPCFTTDHQGARACDDCCGGKGRGKCYGPQCLCR |
| SEQ ID NO: 326 | GSGCGPCFTTDHQGARRCDDCCGGKGRGKCYGPQCLCR |
| SEQ ID NO: 327 | GSGCGPCFTTDHQGARKCDDCCGGAGRGKCYGPQCLCR |
| SEQ ID NO: 328 | GSGCGPCFTTDHQGARACDDCCGGAGRGKCYGPQCLCR |
| SEQ ID NO: 329 | GSGCGPCFTTDHQGARRCDDCCGGAGRGKCYGPQCLCR |
| SEQ ID NO: 330 | GSGCGPCFTTDHQGARKCDDCCGGRGRGKCYGPQCLCR |
| SEQ ID NO: 331 | GSGCGPCFTTDHQGARACDDCCGGRGRGKCYGPQCLCR |
| SEQ ID NO: 332 | GSGCGPCFTTDHQGARRCDDCCGGRGRGKCYGPQCLCR |
| SEQ ID NO: 333 | GSGCGPCFTTDHQGARKCDDCCGGKGRGACYGPQCLCR |
| SEQ ID NO: 334 | GSGCGPCFTTDHQGARACDDCCGGKGRGACYGPQCLCR |
| SEQ ID NO: 335 | GSGCGPCFTTDHQGARRCDDCCGGKGRGACYGPQCLCR |
| SEQ ID NO: 336 | GSGCGPCFTTDHQGARKCDDCCGGAGRGACYGPQCLCR |
| SEQ ID NO: 337 | GSGCGPCFTTDHQGARACDDCCGGAGRGACYGPQCLCR |
| SEQ ID NO: 338 | GSGCGPCFTTDHQGARRCDDCCGGAGRGACYGPQCLCR |
| SEQ ID NO: 339 | GSGCGPCFTTDHQGARKCDDCCGGRGRGACYGPQCLCR |
| SEQ ID NO: 340 | GSGCGPCFTTDHQGARACDDCCGGRGRGACYGPQCLCR |
| SEQ ID NO: 341 | GSGCGPCFTTDHQGARRCDDCCGGRGRGACYGPQCLCR |
| SEQ ID NO: 342 | GSGCGPCFTTDHQGARKCDDCCGGKGRGRCYGPQCLCR |
| SEQ ID NO: 343 | GSGCGPCFTTDHQGARACDDCCGGKGRGRCYGPQCLCR |
| SEQ ID NO: 344 | GSGCGPCFTTDHQGARRCDDCCGGKGRGRCYGPQCLCR |
| SEQ ID NO: 345 | GSGCGPCFTTDHQGARKCDDCCGGAGRGRCYGPQCLCR |
| SEQ ID NO: 346 | GSGCGPCFTTDHQGARACDDCCGGAGRGRCYGPQCLCR |
| SEQ ID NO: 347 | GSGCGPCFTTDHQGARRCDDCCGGAGRGRCYGPQCLCR |
| SEQ ID NO: 348 | GSGCGPCFTTDHQGARKCDDCCGGRGRGRCYGPQCLCR |
| SEQ ID NO: 349 | GSGCGPCFTTDHQGARACDDCCGGRGRGRCYGPQCLCR |
| SEQ ID NO: 350 | GSGCGPCFTTDHQGARRCDDCCGGRGRGRCYGPQCLCR |
| SEQ ID NO: 351 | GSKCGPCFTTDHQGARRCDDCCGGRGRGRCYGPQCLCR |
| SEQ ID NO: 352 | GSGCGPCFTTDHQGAR(Cit)CDDCCGG(Cit)GRGKCYGPQCLCR |
| SEQ ID NO: 353 | GSGCGPCFTTDHQGAR(Cit)CDDCCGG(Cit)GRG(Cit)CYGPQCLCR |
| SEQ ID NO: 354 | GSKCGPCFTTDHQGAR(Cit)CDDCCGG(Cit)GRG(Cit)CYGPQCLCR |
| SEQ ID NO: 355 | GSACAPCFTTDHQAARACDDCCGGKGRGKCYGPQCLCR |
| SEQ ID NO: 356 | GSACAPCFTTDHQAARRCDDCCGGKGRGKCYGPQCLCR |
| SEQ ID NO: 357 | GSACAPCFTTDHQAARKCDDCCGGAGRGKCYGPQCLCR |
| SEQ ID NO: 358 | GSACAPCFTTDHQAARACDDCCGGAGRGKCYGPQCLCR |
| SEQ ID NO: 359 | GSACAPCFTTDHQAARRCDDCCGGAGRGKCYGPQCLCR |
| SEQ ID NO: 360 | GSACAPCFTTDHQAARKCDDCCGGRGRGKCYGPQCLCR |
| SEQ ID NO: 361 | GSACAPCFTTDHQAARACDDCCGGRGRGKCYGPQCLCR |
| SEQ ID NO: 362 | GSACAPCFTTDHQAARKCDDCCGGKGRGACYGPQCLCR |
| SEQ ID NO: 363 | GSACAPCFTTDHQAARACDDCCGGKGRGACYGPQCLCR |
| SEQ ID NO: 364 | GSACAPCFTTDHQAARRCDDCCGGKGRGACYGPQCLCR |
| SEQ ID NO: 365 | GSACAPCFTTDHQAARKCDDCCGGAGRGACYGPQCLCR |
| SEQ ID NO: 366 | GSACAPCFTTDHQAARACDDCCGGAGRGACYGPQCLCR |
| SEQ ID NO: 367 | GSACAPCFTTDHQAARRCDDCCGGAGRGACYGPQCLCR |
| SEQ ID NO: 368 | GSACAPCFTTDHQAARKCDDCCGGRGRGACYGPQCLCR |
| SEQ ID NO: 369 | GSACAPCFTTDHQAARACDDCCGGRGRGACYGPQCLCR |
| SEQ ID NO: 370 | GSACAPCFTTDHQAARRCDDCCGGRGRGACYGPQCLCR |
| SEQ ID NO: 371 | GSACAPCFTTDHQAARKCDDCCGGKGRGRCYGPQCLCR |
| SEQ ID NO: 372 | GSACAPCFTTDHQAARACDDCCGGKGRGRCYGPQCLCR |
| SEQ ID NO: 373 | GSACAPCFTTDHQAARRCDDCCGGKGRGRCYGPQCLCR |
| SEQ ID NO: 374 | GSACAPCFTTDHQAARKCDDCCGGAGRGRCYGPQCLCR |
| SEQ ID NO: 375 | GSACAPCFTTDHQAARACDDCCGGAGRGRCYGPQCLCR |
| SEQ ID NO: 376 | GSACAPCFTTDHQAARRCDDCCGGAGRGRCYGPQCLCR |
| SEQ ID NO: 377 | GSACAPCFTTDHQAARKCDDCCGGRGRGRCYGPQCLCR |
| SEQ ID NO: 378 | GSACAPCFTTDHQAARACDDCCGGRGRGRCYGPQCLCR |
| SEQ ID NO: 379 | GSICIPCFTTDHQIARKCDDCCGGKGRGKCYGPQCLCR |
| SEQ ID NO: 380 | GSICIPCFTTDHQIARACDDCCGGKGRGKCYGPQCLCR |
| SEQ ID NO: 381 | GSICIPCFTTDHQIARRCDDCCGGKGRGKCYGPQCLCR |
| SEQ ID NO: 382 | GSICIPCFTTDHQIARKCDDCCGGAGRGKCYGPQCLCR |
| SEQ ID NO: 383 | GSICIPCFTTDHQIARACDDCCGGAGRGKCYGPQCLCR |
| SEQ ID NO: 384 | GSICIPCFTTDHQIARRCDDCCGGAGRGKCYGPQCLCR |
| SEQ ID NO: 385 | GSICIPCFTTDHQIARKCDDCCGGRGRGKCYGPQCLCR |
| SEQ ID NO: 386 | GSICIPCFTTDHQIARACDDCCGGRGRGKCYGPQCLCR |
| SEQ ID NO: 387 | GSICIPCFTTDHQIARKCDDCCGGKGRGACYGPQCLCR |
| SEQ ID NO: 388 | GSICIPCFTTDHQIARACDDCCGGKGRGACYGPQCLCR |
| SEQ ID NO: 389 | GSICIPCFTTDHQIARRCDDCCGGKGRGACYGPQCLCR |
| SEQ ID NO: 390 | GSICIPCFTTDHQIARKCDDCCGGAGRGACYGPQCLCR |
| SEQ ID NO: 391 | GSICIPCFTTDHQIARACDDCCGGAGRGACYGPQCLCR |
| SEQ ID NO: 392 | GSICIPCFTTDHQIARRCDDCCGGAGRGACYGPQCLCR |
| SEQ ID NO: 393 | GSICIPCFTTDHQIARKCDDCCGGRGRGACYGPQCLCR |
| SEQ ID NO: 394 | GSICIPCFTTDHQIARACDDCCGGRGRGACYGPQCLCR |
| SEQ ID NO: 395 | GSICIPCFTTDHQIARRCDDCCGGRGRGACYGPQCLCR |
| SEQ ID NO: 396 | GSICIPCFTTDHQIARKCDDCCGGKGRGRCYGPQCLCR |
| SEQ ID NO: 397 | GSICIPCFTTDHQIARACDDCCGGKGRGRCYGPQCLCR |
| SEQ ID NO: 398 | GSICIPCFTTDHQIARRCDDCCGGKGRGRCYGPQCLCR |
| SEQ ID NO: 399 | GSICIPCFTTDHQIARKCDDCCGGAGRGRCYGPQCLCR |
| SEQ ID NO: 400 | GSICIPCFTTDHQIARACDDCCGGAGRGRCYGPQCLCR |
| SEQ ID NO: 401 | GSICIPCFTTDHQIARRCDDCCGGAGRGRCYGPQCLCR |
| SEQ ID NO: 402 | GSICIPCFTTDHQIARKCDDCCGGRGRGRCYGPQCLCR |
| SEQ ID NO: 403 | GSICIPCFTTDHQIARACDDCCGGRGRGRCYGPQCLCR |
| SEQ ID NO: 404 | GSICIPCFTTDHQIARRCDDCCGGRGRGRCYGPQCLCR |
| SEQ ID NO: 405 | GSKCIPCFTTDHQIARRCDDCCGGRGRGRCYGPQCLCR |
| SEQ ID NO: 406 | GSICIPCFTTDHQIAR(Cit)CDDCCGG(CiOGRGKCYGPQCLCR |
| SEQ ID NO: 407 | GSICIPCFTTDHQIAR(Cit)CDDCCGG(CiOGRG(Cit)CYGPQCLCR |
| SEQ ID NO: 408 | GSKCIPCFTTDHQIAR(Cit)CDDCCGG(CiOGRG(Cit)CYGPQCLCR |
| SEQ ID NO: 409 | GSTCTPCFTTDHQTARKCDDCCGGKGRGKCYGPQCLCR |
| SEQ ID NO: 410 | GSTCTPCFTTDHQTARACDDCCGGKGRGKCYGPQCLCR |
| SEQ ID NO: 411 | GSTCTPCFTTDHQTARRCDDCCGGKGRGKCYGPQCLCR |
| SEQ ID NO: 412 | GSTCTPCFTTDHQTARKCDDCCGGAGRGKCYGPQCLCR |
| SEQ ID NO: 413 | GSTCTPCFTTDHQTARACDDCCGGAGRGKCYGPQCLCR |
| SEQ ID NO: 414 | GSTCTPCFTTDHQTARRCDDCCGGAGRGKCYGPQCLCR |
| SEQ ID NO: 415 | GSTCTPCFTTDHQTARKCDDCCGGRGRGKCYGPQCLCR |
| SEQ ID NO: 416 | GSTCTPCFTTDHQTARACDDCCGGRGRGKCYGPQCLCR |
| SEQ ID NO: 417 | GSTCTPCFTTDHQTARRCDDCCGGRGRGKCYGPQCLCR |
| SEQ ID NO: 418 | GSTCTPCFTTDHQTARKCDDCCGGKGRGACYGPQCLCR |
| SEQ ID NO: 419 | GSTCTPCFTTDHQTARACDDCCGGKGRGACYGPQCLCR |
| SEQ ID NO: 420 | GSTCTPCFTTDHQTARRCDDCCGGKGRGACYGPQCLCR |
| SEQ ID NO: 421 | GSTCTPCFTTDHQTARKCDDCCGGAGRGACYGPQCLCR |
| SEQ ID NO: 422 | GSTCTPCFTTDHQTARACDDCCGGAGRGACYGPQCLCR |
| SEQ ID NO: 423 | GSTCTPCFTTDHQTARRCDDCCGGAGRGACYGPQCLCR |
| SEQ ID NO: 424 | GSTCTPCFTTDHQTARKCDDCCGGRGRGACYGPQCLCR |
| SEQ ID NO: 425 | GSTCTPCFTTDHQTARACDDCCGGRGRGACYGPQCLCR |
| SEQ ID NO: 426 | GSTCTPCFTTDHQTARRCDDCCGGRGRGACYGPQCLCR |
| SEQ ID NO: 427 | GSTCTPCFTTDHQTARKCDDCCGGKGRGRCYGPQCLCR |
| SEQ ID NO: 428 | GSTCTPCFTTDHQTARACDDCCGGKGRGRCYGPQCLCR |
| SEQ ID NO: 429 | GSTCTPCFTTDHQTARRCDDCCGGKGRGRCYGPQCLCR |
| SEQ ID NO: 430 | GSTCTPCFTTDHQTARKCDDCCGGAGRGRCYGPQCLCR |
| SEQ ID NO: 431 | GSTCTPCFTTDHQTARACDDCCGGAGRGRCYGPQCLCR |
| SEQ ID NO: 432 | GSTCTPCFTTDHQTARRCDDCCGGAGRGRCYGPQCLCR |
| SEQ ID NO: 433 | GSTCTPCFTTDHQTARKCDDCCGGRGRGRCYGPQCLCR |
| SEQ ID NO: 434 | GSTCTPCFTTDHQTARACDDCCGGRGRGRCYGPQCLCR |
| SEQ ID NO: 435 | GSTCTPCFTTDHQTARRCDDCCGGRGRGRCYGPQCLCR |
| SEQ ID NO: 436 | GSKCTPCFTTDHQTARRCDDCCGGRGRGRCYGPQCLCR |
| SEQ ID NO: 437 | GSTCTPCFTTDHQTAR(Cit)CDDCCGG(Cit)GRGKCYGPQCLCR |
| SEQ ID NO: 438 | GSTCTPCFTTDHQTAR(Cit)CDDCCGG(Cit)GRG(Cit)CYGPQCLCR |
| SEQ ID NO: 439 | GSKCTPCFTTDHQTAR(Cit)CDDCCGG(Cit)GRG(Cit)CYGPQCLCR |
| SEQ ID NO: 440 | GSVCVPCFTTDHQVARKCDDCCGGKGRGKCYGPQCLCR |
| SEQ ID NO: 441 | GSVCVPCFTTDHQVARACDDCCGGKGRGKCYGPQCLCR |
| SEQ ID NO: 442 | GSVCVPCFTTDHQVARRCDDCCGGKGRGKCYGPQCLCR |
| SEQ ID NO: 443 | GSVCVPCFTTDHQVARKCDDCCGGAGRGKCYGPQCLCR |
| SEQ ID NO: 444 | GSVCVPCFTTDHQVARACDDCCGGAGRGKCYGPQCLCR |
| SEQ ID NO: 445 | GSVCVPCFTTDHQVARRCDDCCGGAGRGKCYGPQCLCR |
| SEQ ID NO: 446 | GSVCVPCFTTDHQVARKCDDCCGGRGRGKCYGPQCLCR |
| SEQ ID NO: 447 | GSVCVPCFTTDHQVARACDDCCGGRGRGKCYGPQCLCR |
| SEQ ID NO: 448 | GSVCVPCFTTDHQVARRCDDCCGGRGRGKCYGPQCLCR |
| SEQ ID NO: 449 | GSVCVPCFTTDHQVARKCDDCCGGKGRGACYGPQCLCR |
| SEQ ID NO: 450 | GSVCVPCFTTDHQVARACDDCCGGKGRGACYGPQCLCR |
| SEQ ID NO: 451 | GSVCVPCFTTDHQVARRCDDCCGGKGRGACYGPQCLCR |
| SEQ ID NO: 452 | GSVCVPCFTTDHQVARKCDDCCGGAGRGACYGPQCLCR |
| SEQ ID NO: 453 | GSVCVPCFTTDHQVARACDDCCGGAGRGACYGPQCLCR |
| SEQ ID NO: 454 | GSVCVPCFTTDHQVARRCDDCCGGAGRGACYGPQCLCR |
| SEQ ID NO: 455 | GSVCVPCFTTDHQVARKCDDCCGGRGRGACYGPQCLCR |
| SEQ ID NO: 456 | GSVCVPCFTTDHQVARACDDCCGGRGRGACYGPQCLCR |
| SEQ ID NO: 457 | GSVCVPCFTTDHQVARRCDDCCGGRGRGACYGPQCLCR |
| SEQ ID NO: 458 | GSVCVPCFTTDHQVARKCDDCCGGKGRGRCYGPQCLCR |
| SEQ ID NO: 459 | GSVCVPCFTTDHQVARACDDCCGGKGRGRCYGPQCLCR |
| SEQ ID NO: 460 | GSVCVPCFTTDHQVARRCDDCCGGKGRGRCYGPQCLCR |
| SEQ ID NO: 461 | GSVCVPCFTTDHQVARKCDDCCGGAGRGRCYGPQCLCR |
| SEQ ID NO: 462 | GSVCVPCFTTDHQVARACDDCCGGAGRGRCYGPQCLCR |
| SEQ ID NO: 463 | GSVCVPCFTTDHQVARRCDDCCGGAGRGRCYGPQCLCR |
| SEQ ID NO: 464 | GSVCVPCFTTDHQVARKCDDCCGGRGRGRCYGPQCLCR |
| SEQ ID NO: 465 | GSVCVPCFTTDHQVARACDDCCGGRGRGRCYGPQCLCR |
| SEQ ID NO: 466 | GSVCVPCFTTDHQVARRCDDCCGGRGRGRCYGPQCLCR |
| SEQ ID NO: 467 | GSKCVPCFTTDHQVARRCDDCCGGRGRGRCYGPQCLCR |
| SEQ ID NO: 468 | GSVCVPCFTTDHQVAR(Cit)CDDCCGG(Cit)GRGKCYGPQCLCR |
| SEQ ID NO: 469 | GSVCVPCFTTDHQVAR(Cit)CDDCCGG(Cit)GRG(Cit)CYGPQCLCR |
| SEQ ID NO: 470 | GSKCVPCFTTDHQVAR(Cit)CDDCCGG(Cit)GRG(Cit)CYGPQCLCR |
| SEQ ID NO: 471 | GSLCLPCFTTDHQLARKCDDCCGGKGRGKCYGPQCLCR |
| SEQ ID NO: 472 | GSLCLPCFTTDHQLARACDDCCGGKGRGKCYGPQCLCR |
| SEQ ID NO: 473 | GSLCLPCFTTDHQLARRCDDCCGGKGRGKCYGPQCLCR |
| SEQ ID NO: 474 | GSLCLPCFTTDHQLARKCDDCCGGAGRGKCYGPQCLCR |
| SEQ ID NO: 475 | GSLCLPCFTTDHQLARACDDCCGGAGRGKCYGPQCLCR |
| SEQ ID NO: 476 | GSLCLPCFTTDHQLARRCDDCCGGAGRGKCYGPQCLCR |
| SEQ ID NO: 477 | GSLCLPCFTTDHQLARKCDDCCGGRGRGKCYGPQCLCR |
| SEQ ID NO: 478 | GSLCLPCFTTDHQLARACDDCCGGRGRGKCYGPQCLCR |
| SEQ ID NO: 479 | GSLCLPCFTTDHQLARRCDDCCGGRGRGKCYGPQCLCR |
| SEQ ID NO: 480 | GSLCLPCFTTDHQLARKCDDCCGGKGRGACYGPQCLCR |
| SEQ ID NO: 481 | GSLCLPCFTTDHQLARACDDCCGGKGRGACYGPQCLCR |
| SEQ ID NO: 482 | GSLCLPCFTTDHQLARRCDDCCGGKGRGACYGPQCLCR |
| SEQ ID NO: 483 | GSLCLPCFTTDHQLARKCDDCCGGAGRGACYGPQCLCR |
| SEQ ID NO: 484 | GSLCLPCFTTDHQLARACDDCCGGAGRGACYGPQCLCR |
| SEQ ID NO: 485 | GSLCLPCFTTDHQLARRCDDCCGGAGRGACYGPQCLCR |
| SEQ ID NO: 486 | GSLCLPCFTTDHQLARKCDDCCGGRGRGACYGPQCLCR |
| SEQ ID NO: 487 | GSLCLPCFTTDHQLARACDDCCGGRGRGACYGPQCLCR |
| SEQ ID NO: 488 | GSLCLPCFTTDHQLARRCDDCCGGRGRGACYGPQCLCR |
| SEQ ID NO: 489 | GSLCLPCFTTDHQLARKCDDCCGGKGRGRCYGPQCLCR |
| SEQ ID NO: 490 | GSLCLPCFTTDHQLARACDDCCGGKGRGRCYGPQCLCR |
| SEQ ID NO: 491 | GSLCLPCFTTDHQLARRCDDCCGGKGRGRCYGPQCLCR |
| SEQ ID NO: 492 | GSLCLPCFTTDHQLARKCDDCCGGAGRGRCYGPQCLCR |
| SEQ ID NO: 493 | GSLCLPCFTTDHQLARACDDCCGGAGRGRCYGPQCLCR |
| SEQ ID NO: 494 | GSLCLPCFTTDHQLARRCDDCCGGAGRGRCYGPQCLCR |
| SEQ ID NO: 495 | GSLCLPCFTTDHQLARKCDDCCGGRGRGRCYGPQCLCR |
| SEQ ID NO: 496 | GSLCLPCFTTDHQLARACDDCCGGRGRGRCYGPQCLCR |
| SEQ ID NO: 497 | GSLCLPCFTTDHQLARRCDDCCGGRGRGRCYGPQCLCR |
| SEQ ID NO: 498 | GSKCLPCFTTDHQLARRCDDCCGGRGRGRCYGPQCLCR |
| SEQ ID NO: 499 | GSLCLPCFTTDHQLAR(Cit)CDDCCGG(Cit)GRGKCYGPQCLCR |
| SEQ ID NO: 500 | GSLCLPCFTTDHQLAR(Cit)CDDCCGG(Cit)GRG(Cit)CYGPQCLCR |
| SEQ ID NO: 501 | GSKCLPCFTTDHQLAR(Cit)CDDCCGG(Cit)GRG(Cit)CYGPQCLCR |
| SEQ ID NO: 502 | GSSCSPCFTTDHQSARKCDDCCGGKGRGKCYGPQCLCR |
| SEQ ID NO: 503 | GSSCSPCFTTDHQSARACDDCCGGKGRGKCYGPQCLCR |
| SEQ ID NO: 504 | GSSCSPCFTTDHQSARRCDDCCGGKGRGKCYGPQCLCR |
| SEQ ID NO: 505 | GSSCSPCFTTDHQSARKCDDCCGGAGRGKCYGPQCLCR |
| SEQ ID NO: 506 | GSSCSPCFTTDHQSARACDDCCGGAGRGKCYGPQCLCR |
| SEQ ID NO: 507 | GSSCSPCFTTDHQSARRCDDCCGGAGRGKCYGPQCLCR |
| SEQ ID NO: 508 | GSSCSPCFTTDHQSARKCDDCCGGRGRGKCYGPQCLCR |
| SEQ ID NO: 509 | GSSCSPCFTTDHQSARACDDCCGGRGRGKCYGPQCLCR |
| SEQ ID NO: 510 | GSSCSPCFTTDHQSARRCDDCCGGRGRGKCYGPQCLCR |
| SEQ ID NO: 511 | GSSCSPCFTTDHQSARKCDDCCGGKGRGACYGPQCLCR |
| SEQ ID NO: 512 | GSSCSPCFTTDHQSARACDDCCGGKGRGACYGPQCLCR |
| SEQ ID NO: 513 | GSSCSPCFTTDHQSARRCDDCCGGKGRGACYGPQCLCR |
| SEQ ID NO: 514 | GSSCSPCFTTDHQSARKCDDCCGGAGRGACYGPQCLCR |
| SEQ ID NO: 515 | GSSCSPCFTTDHQSARACDDCCGGAGRGACYGPQCLCR |
| SEQ ID NO: 516 | GSSCSPCFTTDHQSARRCDDCCGGAGRGACYGPQCLCR |
| SEQ ID NO: 517 | GSSCSPCFTTDHQSARKCDDCCGGRGRGACYGPQCLCR |
| SEQ ID NO: 518 | GSSCSPCFTTDHQSARACDDCCGGRGRGACYGPQCLCR |
| SEQ ID NO: 519 | GSSCSPCFTTDHQSARRCDDCCGGRGRGACYGPQCLCR |
| SEQ ID NO: 520 | GSSCSPCFTTDHQSARKCDDCCGGKGRGRCYGPQCLCR |
| SEQ ID NO: 521 | GSSCSPCFTTDHQSARACDDCCGGKGRGRCYGPQCLCR |
| SEQ ID NO: 522 | GSSCSPCFTTDHQSARRCDDCCGGKGRGRCYGPQCLCR |
| SEQ ID NO: 523 | GSSCSPCFTTDHQSARKCDDCCGGAGRGRCYGPQCLCR |
| SEQ ID NO: 524 | GSSCSPCFTTDHQSARACDDCCGGAGRGRCYGPQCLCR |
| SEQ ID NO: 525 | GSSCSPCFTTDHQSARRCDDCCGGAGRGRCYGPQCLCR |
| SEQ ID NO: 526 | GSSCSPCFTTDHQSARKCDDCCGGRGRGRCYGPQCLCR |
| SEQ ID NO: 527 | GSSCSPCFTTDHQSARACDDCCGGRGRGRCYGPQCLCR |
| SEQ ID NO: 528 | GSSCSPCFTTDHQSARRCDDCCGGRGRGRCYGPQCLCR |
| SEQ ID NO: 529 | GSKCSPCFTTDHQSARRCDDCCGGRGRGRCYGPQCLCR |
| SEQ ID NO: 530 | GSSCSPCFTTDHQSAR(Cit)CDDCCGG(Cit)GRGKCYGPQCLCR |
| SEQ ID NO: 531 | GSSCSPCFTTDHQSAR(Cit)CDDCCGG(Cit)GRG(Cit)CYGPQCLCR |
| SEQ ID NO: 532 | GSKCSPCFTTDHQSAR(Cit)CDDCCGG(Cit)GRG(Cit)CYGPQCLCR |
| SEQ ID NO: 533 | GSMCMPCFTTDPNMARKCRDCCGGNGKCFGPQCLCNRG |
| SEQ ID NO: 534 | GSMCMPCFTTDHNMAKKCRDCCGGNGKCFGYQCLCNRG |
| SEQ ID NO: 535 | GSMCMPCFTTDHQTARRCRDCCGGRGRKCFGQCLCGYD |
| SEQ ID NO: 536 | GSACGPCFTTDPQMAEKCSDCCGGIGTCYGPQCLCNRL |
| SEQ ID NO: 537 | GSMCMPCFTTRPNMAQQCRDCCRGRGKCFGPQCLCG |
| SEQ ID NO: 538 | GSMCMPCFTTRPNMAQQCRDCCRGRGKCFGPQCLCGYD |
| SEQ ID NO: 539 | GSMCMPCFTTNLNMEQECRDCCGGTGRCFGPQCLCG |
| SEQ ID NO: 540 | GSGCNIPCFTTDRYMARKCKECCRGYGNCFGPQCLCNRG |
| SEQ ID NO: 541 | GSGCGPCFTTDANMARKCRECCGGNGKCFGPQCLCNRE |
| SEQ ID NO: 542 | GSGCGPCFTTDANMARKCRECCGGIGKCFGPQCLCNRI |
| SEQ ID NO: 543 | GSMCMPCFTTRPDMAQQCRACCKGRGKCFGPQCLCG |
| SEQ ID NO: 544 | GSMCIPCFTTNPNMAAKCNACCGSRRGSCRGPQCIC |
| SEQ ID NO: 545 | GSMCMPCFTTRPDMAQQCRDCCGGNGKCFGYQCLCNR |
| SEQ ID NO: 546 | GSCGPCFTTDPYTESKCATCCGGRGKCVGPQCLCNR |
| SEQ ID NO: 547 | GSRCGPCFTTDPQTQAKCSECCGRKGGVCKGPQCICG |
| SEQ ID NO: 548 | GSCGPCFTKDPETEKKCATCCGGIGRCFGPQCLCNRG |
| SEQ ID NO: 549 | GSMCMPCFTTDHQMARRCDDCCGGRGRGKCWGPQCLCR |
| SEQ ID NO: 550 | GSAMCMPCFTTDHNMAKKCRDCCGGNGKCFGPQCLCNRG |
| SEQ ID NO: 551 | GSCGPCFTTDWESEKKCAECCGGIGRCFGPQCLCNRK |
| SEQ ID NO: 552 | GSCGPCFTTDHQTEQKCAECCGGIGKCYGPQCLCRG |
| SEQ ID NO: 553 | GSCGPCFTTDRQMEQKCAECCGGIGKCYGPQCLCRG |
| SEQ ID NO: 554 | GSCGPCFTTDHQTEQKCAECCGGIGKCYGPQCLC |
| SEQ ID NO: 555 | GSCNIPCFTTDHQMARKCDDCCGGRGKCYGPQCLCRG |
| SEQ ID NO: 556 | GSRCGPCFTTDPQTQAKCSECCGRKGGVCKGPQCICGIQ |
| SEQ ID NO: 557 | GSRCPPCFTTNPNMEADCRKCCGGRGYCASYQCICPG |
| SEQ ID NO: 558 | GSCGPCFTTDHNMARKCDECCGGKGRGKCFGPQCLCR |
| SEQ ID NO: 559 | GSVCNIPCFTTDQQMARKCSDCCGGKGRGKCYGPQCLCR |
| SEQ ID NO: 560 | GSMCGPCFTTDANMARKCRECCGGIGKCFGPQCLCNRI |
| SEQ ID NO: 561 | GSMCGPCFTTDANMAAACRECCGGIGKCFGPQCLCNRI |
| SEQ ID NO: 562 | GSMCGPCFTTDANMARKCAECCGGIGKCFGPQCLCNRI |
| SEQ ID NO: 563 | GSMCGPCFTTDANMARKCRECCGGIGACFGPQCLCNRI |
| SEQ ID NO: 564 | GSMCGPCFTTDANMARKCRECCGGIGKCFGPQCLCNAI |
| SEQ ID NO: 565 | GSCNIPCFTTRPNMAQQCRDCCRGRGKCFGPQCLCGYD |
| SEQ ID NO: 566 | GSMCMPCFTTNLNMEQECRDCCGGTGRCFGPQCLCGYD |
| SEQ ID NO: 567 | GSCNIPCFTTRPNMAQQCRDCCRGRGKCFGPQCLCGYD |
| SEQ ID NO: 1243 | GSEISCEPGKTFKDKCNTCRCGADGKSAACTLKACPNQ |
| SEQ ID NO: 1244 | GSSCEPGRTFRDRCNTCRCGADGRSAACTLRACPNQ |
| SEQ ID NO: 1245 | GSSCEPGRTFRDRCNTCKCGADGRSAACTLRACPNQ |
| SEQ ID NO: 1246 | GSSCEPGTTFRDRCNTCRCGSDGRSAACTLRACPQ |
| SEQ ID NO: 1247 | GSSCTPGTTFRDRCNTCRCSSNGRSAACTLRACPPGSY |
| SEQ ID NO: 1248 | GSSCTPGTTFRNRCNTCRCGSNGRSASCTLMACPPGSY |
| SEQ ID NO: 1249 | GSSCTPGATFRNRCNTCRCGSNGRSASCTLMACPPGSY |
| SEQ ID NO: 1250 | GSSCQPGTTYQRGCNTCRCLEDGQTEACTLRLC |
| SEQ ID NO: 1251 | GSSCTPGATYREGCNICRCRSDGRSGACTRRICPVDSN |
| SEQ ID NO: 1252 | GSSCQPGTTFRRDCNTCVCNRDGTNAACTLRACL |
| SEQ ID NO: 568 | MCMPCFTTDHQMARKCDDCCGGKGRGKCYGPQCLCR |
| SEQ ID NO: 569 | MCMPCFTTDHQMARRCDDCCGGRGRGKCYGPQCLCR |
| SEQ ID NO: 570 | MCMPCFTTDHQMARRCDDCCGGRGRGRCYGPQCLCR |
| SEQ ID NO: 571 | MCMPCFTTDHQMARKCDDCCGGRGRGRCYGPQCLCR |
| SEQ ID NO: 572 | MCMPCFTTDHQMARRCDDCCGGKGRGRCYGPQCLCR |
| SEQ ID NO: 573 | MCMPCFTTHHRMAENCDICCGGDGRGKCYGPQCLCR |
| SEQ ID NO: 574 | MCMPCFTTDTQMQERCDRCCGGGGRGKCWGPQCLCI |
| SEQ ID NO: 575 | MCMPCFTTDTQMQERCDRCCGGGGRGRCWGPQCLCI |
| SEQ ID NO: 576 | MCMPCFTTEQRMAIICDDCCGGFGRGKCYGPQCLCR |
| SEQ ID NO: 577 | MCMPCFTTEQRMAIICDDCCGGFGRGRCYGPQCLCR |
| SEQ ID NO: 578 | ICIPCFTTDHQIARRCDDCCGGRGRGKCYGPQCICR |
| SEQ ID NO: 579 | ICIPCFTTDHQIARRCDDCCGGRGRGRCYGPQCICR |
| SEQ ID NO: 580 | MCMPCFTTDHRMAENCDICCGGDGRGKCYGPQCLCR |
| SEQ ID NO: 581 | MCMPCFTTDHRMAENCDICCGGDGRGRCYGPQCLCR |
| SEQ ID NO: 582 | MCMPCFTTEQRMAIICDDCCGGFGRGKCYGPQCLCI |
| SEQ ID NO: 583 | MCMPCFTTEQRMAIICDDCCGGFGRGRCYGPQCLCI |
| SEQ ID NO: 584 | ICIPCFTTDHQIARRCDDCCGGRGRGKCYGPQCICI |
| SEQ ID NO: 585 | ICIPCFTTDHQIARRCDDCCGGRGRGRCYGPQCICI |
| SEQ ID NO: 586 | MCMPCFTTDHRMAENCDICCGGDGRGKCYGPQCLCI |
| SEQ ID NO: 587 | MCMPCFTTDHRMAENCDICCGGDGRGRCYGPQCLCI |
| SEQ ID NO: 588 | MCMPCFTTDTQMQEKCDRCCGGGGRGRCWGPQCLCI |
| SEQ ID NO: 589 | MCMPCFTTEQRMAIKCDDCCGGFGRGRCYGPQCLCR |
| SEQ ID NO: 590 | ICIPCFTTDHQIARKCDDCCGGRGRGRCYGPQCICR |
| SEQ ID NO: 591 | MCMPCFTTDHRMAEKCDICCGGDGRGRCYGPQCLCR |
| SEQ ID NO: 592 | MCMPCFTTDTQMQERCDRCCGGKGRGRCWGPQCLCI |
| SEQ ID NO: 593 | MCMPCFTTEQRMAIICDDCCGGKGRGRCYGPQCLCR |
| SEQ ID NO: 594 | ICIPCFTTDHQIARRCDDCCGGKGRGRCYGPQCICR |
| SEQ ID NO: 595 | MCMPCFTTDHRMAENCDICCGGKGRGRCYGPQCLCR |
| SEQ ID NO: 596 | MCMPCFTTHHRMAENCDICCGGDGRGRCYGPQCLCR |
| SEQ ID NO: 597 | MCMPCFTTDTQMQERCDRCCGGGGRGRCWGPQCLC |
| SEQ ID NO: 598 | MCMPCFTTEQRMAIICDDCCGGFGRGRCYGPQCLC |
| SEQ ID NO: 599 | ICIPCFTTDHQIARRCDDCCGGRGRGRCYGPQCIC |
| SEQ ID NO: 600 | MCMPCFTTDHRMAENCDICCGGDGRGRCYGPQCLC |
| SEQ ID NO: 601 | MCMPCFTTDHQMARRCDDCCGGRGRGRCYGPQCLCI |
| SEQ ID NO: 602 | ACAPCFTTDHQAARRCDDCCGGRGRGKCYGPQCLCR |
| SEQ ID NO: 603 | ACAPCFTTDHQAARKCDDCCGGKGRGKCYGPQCLCR |
| SEQ ID NO: 604 | MCMPCFTTHHRMAENCDICCGGDGRGKCYGPQCLCI |
| SEQ ID NO: 605 | MCMPCFTTHHRMAENCDICCGGDGRGKCYGPQCLC |
| SEQ ID NO: 606 | MCMPCFTTDHQMARRCDDCCGGRGRGRCYGPQCLC |
| SEQ ID NO: 607 | MCMPCFTTHHQMAENCDICCGGDGRGKCYGPQCLCR |
| SEQ ID NO: 608 | MCMPCFTTHHRMARNCDICCGGDGRGKCYGPQCLCR |
| SEQ ID NO: 609 | MCMPCFTTHHRMAERCDICCGGDGRGKCYGPQCLCR |
| SEQ ID NO: 610 | MCMPCFTTHHRMAENCDDCCGGDGRGKCYGPQCLCR |
| SEQ ID NO: 611 | RCMPCFTTDHQMARRCDDCCGGRGRGKCYGPQCLCR |
| SEQ ID NO: 612 | ICIPCFTTDHQIARRCDDCCGGRGRGKCYGPQCLCR |
| SEQ ID NO: 613 | MCLPCFTTDHQLARRCDDCCGGRGRGKCYGPQCLCR |
| SEQ ID NO: 614 | MCMPCFTTEHQMARRCEECCGGRGRGKCYGPQCLCR |
| SEQ ID NO: 615 | MCIPCFTTDHQMARRCEECCGGRGRGKCYGPQCLCR |
| SEQ ID NO: 616 | ICIPCFTTDHQMARRCDDCCGGRGDGKCYGPQCLCR |
| SEQ ID NO: 617 | RCMPCFTTDHFMARFCDFCCGGRGRGKCYGPQCLCR |
| SEQ ID NO: 618 | RCMPCFTTDHYMARYCDYCCGGRGRGKCYGPQCLCR |
| SEQ ID NO: 619 | RCMPCFTTDHRMARRCDRCCGGRGRGKCYGPQCLCR |
| SEQ ID NO: 620 | RCMPCFTTDHEMARECDECCGGRGRGKCYGPQCLCR |
| SEQ ID NO: 621 | RCMPCFTTDEIRMARHCDHCCGGRGRGKCYGPQCLCR |
| SEQ ID NO: 622 | LCLPCFTTHHRLADQCDICCGGDGRGKCYGPQCLCR |
| SEQ ID NO: 623 | ICIPCFTTEHQIARRCEECCGGRGRGKCYGPQCLCR |
| SEQ ID NO: 624 | MCMPCFTTIYRMAHECDECCGGRGRGKCYGPQCLCR |
| SEQ ID NO: 625 | MCMPCFTTGYRMAEYCDICCGGRGRGKCYGPQCLCR |
| SEQ ID NO: 626 | MCMPCFTTHRRMANTCDACCGGRSRGKCYGPQCLCR |
| SEQ ID NO: 627 | HCMPCFTTDHQMIRRCDDCCGGGSYGKCDGPQCLCF |
| SEQ ID NO: 628 | DCMPCFTTDHRMADHCDICCGGDDRGKCYGPQCLCR |
| SEQ ID NO: 629 | MCMPCFTTDHEMERRCDDCCGIGGGGKCHGPQCLCG |
| SEQ ID NO: 630 | MCMPCFTTSEQMFRRCDDCCGGWGDGKCNGPHCLCR |
| SEQ ID NO: 631 | CGPCFTTDHQMEQKCAECCGGIGKCYGPQCLCNR |
| SEQ ID NO: 632 | RCGPCFTTDPQTQAKCSECCGRKGGVCKGPQCICGIQY |
| SEQ ID NO: 633 | MCMPCFTTDPNMAKKCRDCCGGNGKCFGPQCLCNR |
| SEQ ID NO: 634 | MCMPCFTTDHNMAKKCNDCCGGYGKCFGPQCLCR |
| SEQ ID NO: 635 | RCPPCFTTNPNMEADCRKCCGGRGYCASYQCICPGG |
| SEQ ID NO: 636 | MCMPCFTTDPNMANKCRDCCGGGKKCFGPQCLCNR |
| SEQ ID NO: 637 | MKFLYGVILIALFLTVMTATLSEARCGPCFTTDPQTQAKCSECCG |
| | RKGGVCKGPQCICGIQY |
| SEQ ID NO: 638 | MCMPCFTTRPDMAQQCRACCKGRGKCFGPQCLCGYD |
| SEQ ID NO: 639 | MKFLYGIVFIALFLTVMTATLSDAMCMPCFTTDHNMAKKCRDC |
| | CGGNGKCFGPQCLCNRG |
| SEQ ID NO: 640 | MCMPCFTTDHNMAKKCRDCCGGNGKCFGPQCLCNR |
| SEQ ID NO: 641 | MKFLYGIVFITLFLTVMIATHTEAMCMPCFTTRPNMAQQCRDCC |
| | RGRGKCFGPQCLCGYD |
| SEQ ID NO: 642 | MKFLYGIVFIALFLTVMIATHTEAMCMPCFTTRPNMAQQCRDCC |
| | RGRGKCFGPQCLCGYD |
| SEQ ID NO: 643 | RCKPCFTTDPQMSKKCADCCGGKGKGKCYGPQCLC |
| SEQ ID NO: 644 | MKFLYGIVFITLFLTVMIATHTEAAMCMPCFTTNLNMEQECRDC |
| | CGGTGRCFGPQCLCGYD |
| SEQ ID NO: 645 | RCSPCFTTDQQMTKKCYDCCGGKGKGKCYGPQCICAPY |
| SEQ ID NO: 646 | CGPCFTTDPYTESKCATCCGGRGKCVGPQCLCNRI |
| SEQ ID NO: 647 | TEAMCMPCFTTDHNMAKKCRDCCGGNGKCFGYQCLCNRG |
| SEQ ID NO: 648 | MKFLYGIVFIALFLTVMFATQTDGCGPCFTTDANMARKCRECCG |
| | GIGKCFGPQCLCNRI |
| SEQ ID NO: 649 | MKFLYGIVFIALFLTVMFATQTDGCGPCFTTDANMARKCRECCG |
| | GNGKCFGPQCLCNRE |
| SEQ ID NO: 650 | MKFLYGTILIAFFLTVMIATHSEARCPPCFTTNPNMEADCRKCCG |
| | GRGYCASYQCICPGG |
| SEQ ID NO: 651 | TEAMCMPCFTTRPDMAQQCRDCCGGNGKCFGYQCLCNRG |
| SEQ ID NO: 652 | MKFLYGIVFIALFLTVMIATLTEAMCMPCFTTRPDMAQQCRDCC |
| | GGNGKCFGYQCLCNRG |
| SEQ ID NO: 653 | MKFLYGIVFIALFLTVMIATHTEAMCMPCFTTRPDMAQQCRDCC |
| | GGNGKCFGYQCLCNRG |
| SEQ ID NO: 654 | MKFLYGIILIALFLTVMIATHSEARCPNCFTTNPNAEADCKKCCG |
| | NRWGKCAGYQCVCPMK |
| SEQ ID NO: 655 | MKFLYGIVFIALFLTGMIATHTEAMCMPCFTTRPDMAQQCRDCC |
| | GGNGKCFGYQCLCNRGRIVIMYT |
| SEQ ID NO: 656 | MCMPCFTTRPGMAQQCRDCCGGNGKCFGYQCLCNR |
| SEQ ID NO: 657 | MCIPCFTTNPNMAAKCNACCGSRRGSCRGPQCICR |
| SEQ ID NO: 658 | MCIPCFTTNPNMAAKCNACCGSRRGSCRGPQCICN |
| SEQ ID NO: 659 | MCIPCFTTNPNMAAKCNACCGGNGSCRGPQCICN |
| SEQ ID NO: 660 | MCIPCFTTNPNMAAKCNACCGSRGRGSCRGPQCICN |
| SEQ ID NO: 661 | MCIPCFTTNPNMAAKCNACCGSRGRGKCRGPQCICN |
| SEQ ID NO: 662 | MCIPCFTTDHQMAAKCNACCGSRRGSCRGPQCICN |
| SEQ ID NO: 663 | MCIPCFTTNHQMAAKCNACCGSRRGSCRGPQCICN |
| SEQ ID NO: 664 | MCIPCFTTNPNMARKCNACCGSRGRGSCRGPQCICN |
| SEQ ID NO: 665 | MCIPCFTTNPNMAAKCNACCGGKGRGSCRGPQCICN |
| SEQ ID NO: 666 | MCIPCFTTNPNMAAKCNACCGSRRGSCFGPQCICN |
| SEQ ID NO: 667 | MCIPCFTTNPNMAAKCNACCGSRGRGKCFGPQCICN |
| SEQ ID NO: 668 | MCIPCFTTNPNMAAKCNACCGSRGRGSCFGPQCICN |
| SEQ ID NO: 669 | MCIPCFTTNPNMAAKCNACCGSRGRGSCYGPQCICN |
| SEQ ID NO: 670 | MCIPCFTTNPNMAAKCDACCGSRRGSCRGPQCICN |
| SEQ ID NO: 671 | MCIPCFTTNHQMAAKCDACCGSRRGSCRGPQCICN |
| SEQ ID NO: 672 | MCIPCFTTNHNMAAKCDACCGGRGRGSCRGPQCICN |
| SEQ ID NO: 673 | MCIPCFTTNPNMAAKCDACCGSRGRGSCRGPQCICN |
| SEQ ID NO: 674 | MCIPCFTTNPNMAAKCDACCGGKGRGSCRGPQCICN |
| SEQ ID NO: 675 | MCIPCFTTNHNMAAKCDACCGSRGRGSCRGPQCICN |
| SEQ ID NO: 676 | MCIPCFTTNPNMAAKCRDCCGGRGSCRGPQCICN |
| SEQ ID NO: 677 | MCMPCFTTNPNMAAKCDDCCGSRGRGSCRGPQCICN |
| SEQ ID NO: 678 | MCIPCFTTNPNMAARCNACCGSRRGSCRGPQCIC |
| SEQ ID NO: 679 | MCIPCFTTNPNMAAKCNACCGSRRGSCRGPQCICI |
| SEQ ID NO: 680 | MCMPCFTTDHQMARACDDCCGGKGRGKCYGPQCLCR |
| SEQ ID NO: 681 | MCMPCFTTDHQMARRCDDCCGGKGRGKCYGPQCLCR |
| SEQ ID NO: 682 | MCMPCFTTDHQMARKCDDCCGGAGRGKCYGPQCLCR |
| SEQ ID NO: 683 | MCMPCFTTDHQMARACDDCCGGAGRGKCYGPQCLCR |
| SEQ ID NO: 684 | MCMPCFTTDHQMARRCDDCCGGAGRGKCYGPQCLCR |
| SEQ ID NO: 685 | MCMPCFTTDHQMARKCDDCCGGRGRGKCYGPQCLCR |
| SEQ ID NO: 686 | MCMPCFTTDHQMARACDDCCGGRGRGKCYGPQCLCR |
| SEQ ID NO: 687 | MCMPCFTTDHQMARKCDDCCGGKGRGACYGPQCLCR |
| SEQ ID NO: 688 | MCMPCFTTDHQMARACDDCCGGKGRGACYGPQCLCR |
| SEQ ID NO: 689 | MCMPCFTTDHQMARRCDDCCGGKGRGACYGPQCLCR |
| SEQ ID NO: 690 | MCMPCFTTDHQMARKCDDCCGGAGRGACYGPQCLCR |
| SEQ ID NO: 691 | MCMPCFTTDHQMARACDDCCGGAGRGACYGPQCLCR |
| SEQ ID NO: 692 | MCMPCFTTDHQMARRCDDCCGGAGRGACYGPQCLCR |
| SEQ ID NO: 693 | MCMPCFTTDHQMARKCDDCCGGRGRGACYGPQCLCR |
| SEQ ID NO: 694 | MCMPCFTTDHQMARACDDCCGGRGRGACYGPQCLCR |
| SEQ ID NO: 695 | MCMPCFTTDHQMARRCDDCCGGRGRGACYGPQCLCR |
| SEQ ID NO: 696 | MCMPCFTTDHQMARKCDDCCGGKGRGRCYGPQCLCR |
| SEQ ID NO: 697 | MCMPCFTTDHQMARACDDCCGGKGRGRCYGPQCLCR |
| SEQ ID NO: 698 | MCMPCFTTDHQMARKCDDCCGGAGRGRCYGPQCLCR |
| SEQ ID NO: 699 | MCMPCFTTDHQMARACDDCCGGAGRGRCYGPQCLCR |
| SEQ ID NO: 700 | MCMPCFTTDHQMARRCDDCCGGAGRGRCYGPQCLCR |
| SEQ ID NO: 701 | MCMPCFTTDHQMARACDDCCGGRGRGRCYGPQCLCR |
| SEQ ID NO: 702 | KCNIPCFTTDHQMARRCDDCCGGRGRGRCYGPQCLCR |
| SEQ ID NO: 703 | ACAPCFTTDHQAARRCDDCCGGRGRGRCYGPQCLCR |
| SEQ ID NO: 704 | KCAPCFTTDHQAARRCDDCCGGRGRGRCYGPQCLCR |
| SEQ ID NO: 705 | MCMPCFTTDHQMAR(Cit)CDDCCGG(Cit)GRGKCYGPQCLCR |
| SEQ ID NO: 706 | MCMPCFTTDHQMAR(Cit)CDDCCGG(Cit)GRG(Cit)CYGPQCLCR |
| SEQ ID NO: 707 | KCNIPCFTTDHQMAR(Cit)CDDCCGG(Cit)GRG(Cit)CYGPQCLCR |
| SEQ ID NO: 708 | ACAPCFTTDHQAAR(Cit)CDDCCGG(Cit)GRGKCYGPQCLCR |
| SEQ ID NO: 709 | ACAPCFTTDHQAAR(Cit)CDDCCGG(Cit)GRG(Cit)CYGPQCLCR |
| SEQ ID NO: 710 | KCAPCFTTDHQAAR(Cit)CDDCCGG(Cit)GRG(Cit)CYGPQCLCR |
| SEQ ID NO: 711 | MCMPCFTTDHQMARKCDDCCGGKGRGKCYGPQCLCRGAGAAG |
| | G |
| SEQ ID NO: 712 | MCMPCFTTDHQMARACDDCCGGKGRGKCYGPQCLCRGAGAAG |
| | G |
| SEQ ID NO: 713 | MCMPCFTTDHQMARRCDDCCGGKGRGKCYGPQCLCRGAGAAG |
| | G |
| SEQ ID NO: 714 | MCMPCFTTDHQMARKCDDCCGGAGRGKCYGPQCLCRGAGAAG |
| | G |
| SEQ ID NO: 715 | MCMPCFTTDHQMARACDDCCGGAGRGKCYGPQCLCRGAGAAG |
| | G |
| SEQ ID NO: 716 | MCMPCFTTDHQMARRCDDCCGGAGRGKCYGPQCLCRGAGAAG |
| | G |
| SEQ ID NO: 717 | MCMPCFTTDHQMARKCDDCCGGRGRGKCYGPQCLCRGAGAAG |
| | G |
| SEQ ID NO: 718 | MCMPCFTTDHQMARACDDCCGGRGRGKCYGPQCLCRGAGAAG |
| | G |
| SEQ ID NO: 719 | MCMPCFTTDHQMARRCDDCCGGRGRGKCYGPQCLCRGAGAAG |
| | G |
| SEQ ID NO: 720 | MCMPCFTTDHQMARKCDDCCGGKGRGACYGPQCLCRGAGAAG |
| | G |
| SEQ ID NO: 721 | MCMPCFTTDHQMARACDDCCGGKGRGACYGPQCLCRGAGAAG |
| | G |
| SEQ ID NO: 722 | MCMPCFTTDHQMARRCDDCCGGKGRGACYGPQCLCRGAGAAG |
| | G |
| SEQ ID NO: 723 | MCMPCFTTDHQMARKCDDCCGGAGRGACYGPQCLCRGAGAAG |
| | G |
| SEQ ID NO: 724 | MCMPCFTTDHQMARACDDCCGGAGRGACYGPQCLCRGAGAAG |
| | G |
| SEQ ID NO: 725 | MCMPCFTTDHQMARRCDDCCGGAGRGACYGPQCLCRGAGAAG |
| | G |
| SEQ ID NO: 726 | MCMPCFTTDHQMARKCDDCCGGRGRGACYGPQCLCRGAGAAG |
| | G |
| SEQ ID NO: 727 | MCMPCFTTDHQMARACDDCCGGRGRGACYGPQCLCRGAGAAG |
| | G |
| SEQ ID NO: 728 | MCMPCFTTDHQMARRCDDCCGGRGRGACYGPQCLCRGAGAAG |
| | G |
| SEQ ID NO: 729 | MCMPCFTTDHQMARKCDDCCGGKGRGRCYGPQCLCRGAGAAG |
| | G |
| SEQ ID NO: 730 | MCMPCFTTDHQMARACDDCCGGKGRGRCYGPQCLCRGAGAAG |
| | G |
| SEQ ID NO: 731 | MCMPCFTTDHQMARRCDDCCGGKGRGRCYGPQCLCRGAGAAG |
| | G |
| SEQ ID NO: 732 | MCMPCFTTDHQMARKCDDCCGGAGRGRCYGPQCLCRGAGAAG |
| | G |
| SEQ ID NO: 733 | MCMPCFTTDHQMARACDDCCGGAGRGRCYGPQCLCRGAGAAG |
| | G |
| SEQ ID NO: 734 | MCMPCFTTDHQMARRCDDCCGGAGRGRCYGPQCLCRGAGAAG |
| | G |
| SEQ ID NO: 735 | MCMPCFTTDHQMARKCDDCCGGRGRGRCYGPQCLCRGAGAAG |
| | G |
| SEQ ID NO: 736 | MCMPCFTTDHQMARACDDCCGGRGRGRCYGPQCLCRGAGAAG |
| | G |
| SEQ ID NO: 737 | MCMPCFTTDHQMARRCDDCCGGRGRGRCYGPQCLCRGAGAAG |
| | G |
| SEQ ID NO: 738 | KCMPCFTTDHQMARRCDDCCGGRGRGRCYGPQCLCRGAGAAG |
| | G |
| SEQ ID NO: 739 | ACAPCFTTDHQAARRCDDCCGGRGRGRCYGPQCLCRGAGAAGG |
| SEQ ID NO: 740 | KCAPCFTTDHQAARRCDDCCGGRGRGRCYGPQCLCRGAGAAGG |
| SEQ ID NO: 741 | MCMPCFTTDHQMAR(Cit)CDDCCGG(Cit)GRGKCYGPQCLCRGA |
| | GAAGG |
| SEQ ID NO: 742 | MCMPCFTTDHQMAR(Cit)CDDCCGG(Cit)GRG(Cit)CYGPQC |
| | LCRGAGAAGG |
| SEQ ID NO: 743 | KCMPCFTTDHQMAR(Cit)CDDCCGG(Cit)GRG(Cit)CYGPQC |
| | LCRGAGAAGG |
| SEQ ID NO: 744 | ACAPCFTTDHQAAR(Cit)CDDCCGG(Cit)GRGKCYGPQCLCRG |
| | AGAAGG |
| SEQ ID NO: 745 | ACAPCFTTDHQAAR(Cit)CDDCCGG(Cit)GRG(Cit)CYGPQC |
| | LCRGAGAAGG |
| SEQ ID NO: 746 | KCAPCFTTDHQAAR(Cit)CDDCCGG(Cit)GRG(Cit)CYGPQC |
| | LCRGAGAAGG |
| SEQ ID NO: 747 | MCMPCFTTDHQMVRKCDDCCGGKGRGKCYGPQCLCR |
| SEQ ID NO: 748 | MCMPCFTTDHQMVRVCDDCCGGKGRGKCYGPQCLCR |
| SEQ ID NO: 749 | MCMPCFTTDHQMVRRCDDCCGGKGRGKCYGPQCLCR |
| SEQ ID NO: 750 | MCMPCFTTDHQMVRKCDDCCGGVGRGKCYGPQCLCR |
| SEQ ID NO: 751 | MCMPCFTTDHQMVRVCDDCCGGVGRGKCYGPQCLCR |
| SEQ ID NO: 752 | MCMPCFTTDHQMVRRCDDCCGGVGRGKCYGPQCLCR |
| SEQ ID NO: 753 | MCMPCFTTDHQMVRKCDDCCGGRGRGKCYGPQCLCR |
| SEQ ID NO: 754 | MCMPCFTTDHQMVRVCDDCCGGRGRGKCYGPQCLCR |
| SEQ ID NO: 755 | MCMPCFTTDHQMVRRCDDCCGGRGRGKCYGPQCLCR |
| SEQ ID NO: 756 | MCMPCFTTDHQMVRKCDDCCGGKGRGVCYGPQCLCR |
| SEQ ID NO: 757 | MCMPCFTTDHQMVRVCDDCCGGKGRGVCYGPQCLCR |
| SEQ ID NO: 758 | MCMPCFTTDHQMVRRCDDCCGGKGRGVCYGPQCLCR |
| SEQ ID NO: 759 | MCMPCFTTDHQMVRKCDDCCGGVGRGVCYGPQCLCR |
| SEQ ID NO: 760 | MCMPCFTTDHQMVRVCDDCCGGVGRGVCYGPQCLCR |
| SEQ ID NO: 761 | MCMPCFTTDHQMVRRCDDCCGGVGRGVCYGPQCLCR |
| SEQ ID NO: 762 | MCMPCFTTDHQMVRKCDDCCGGRGRGVCYGPQCLCR |
| SEQ ID NO: 763 | MCMPCFTTDHQMVRVCDDCCGGRGRGVCYGPQCLCR |
| SEQ ID NO: 764 | MCMPCFTTDHQMVRRCDDCCGGRGRGVCYGPQCLCR |
| SEQ ID NO: 765 | MCMPCFTTDHQMVRKCDDCCGGKGRGRCYGPQCLCR |
| SEQ ID NO: 766 | MCMPCFTTDHQMVRVCDDCCGGKGRGRCYGPQCLCR |
| SEQ ID NO: 767 | MCMPCFTTDHQMVRRCDDCCGGKGRGRCYGPQCLCR |
| SEQ ID NO: 768 | MCMPCFTTDHQMVRKCDDCCGGVGRGRCYGPQCLCR |
| SEQ ID NO: 769 | MCMPCFTTDHQMVRVCDDCCGGVGRGRCYGPQCLCR |
| SEQ ID NO: 770 | MCMPCFTTDHQMVRRCDDCCGGVGRGRCYGPQCLCR |
| SEQ ID NO: 771 | MCMPCFTTDHQMVRKCDDCCGGRGRGRCYGPQCLCR |
| SEQ ID NO: 772 | MCMPCFTTDHQMVRVCDDCCGGRGRGRCYGPQCLCR |
| SEQ ID NO: 773 | MCMPCFTTDHQMVRRCDDCCGGRGRGRCYGPQCLCR |
| SEQ ID NO: 774 | KCNIPCFTTDHQMVRRCDDCCGGRGRGRCYGPQCLCR |
| SEQ ID NO: 775 | VCVPCFTTDHQVVRRCDDCCGGRGRGRCYGPQCLCR |
| SEQ ID NO: 776 | KCVPCFTTDHQVVRRCDDCCGGRGRGRCYGPQCLCR |
| SEQ ID NO: 777 | MCMPCFTTDHQMVR(Cit)CDDCCGG(Cit)GRGKCYGPQCLCR |
| SEQ ID NO: 778 | MCMPCFTTDHQMVR(Cit)CDDCCGG(Cit)GRG(Cit)CYGPQCLCR |
| SEQ ID NO: 779 | KCNIPCFTTDHQMVR(Cit)CDDCCGG(Cit)GRG(Cit)CYGPQCLCR |
| SEQ ID NO: 780 | VCVPCFTTDHQVVR(Cit)CDDCCGG(Cit)GRGKCYGPQCLCR |
| SEQ ID NO: 781 | VCVPCFTTDHQVVR(Cit)CDDCCGG(Cit)GRG(Cit)CYGPQCLCR |
| SEQ ID NO: 782 | KCVPCFTTDHQVVR(Cit)CDDCCGG(Cit)GRG(Cit)CYGPQCLCR |
| SEQ ID NO: 783 | MCMPCFTTDHQMVRKCDDCCGGKGRGKCYGPQCLCRGAGAAG |
| | G |
| SEQ ID NO: 784 | MCMPCFTTDHQMVRVCDDCCGGKGRGKCYGPQCLCRGAGAAG |
| | G |
| SEQ ID NO: 785 | MCMPCFTTDHQMVRRCDDCCGGKGRGKCYGPQCLCRGAGAAG |
| | G |
| SEQ ID NO: 786 | MCMPCFTTDHQMVRKCDDCCGGVGRGKCYGPQCLCRGAGAAG |
| | G |
| SEQ ID NO: 787 | MCMPCFTTDHQMVRVCDDCCGGVGRGKCYGPQCLCRGAGAAG |
| | G |
| SEQ ID NO: 788 | MCMPCFTTDHQMVRRCDDCCGGVGRGKCYGPQCLCRGAGAAG |
| | G |
| SEQ ID NO: 789 | MCMPCFTTDHQMVRKCDDCCGGRGRGKCYGPQCLCRGAGAAG |
| | G |
| SEQ ID NO: 790 | MCMPCFTTDHQMVRVCDDCCGGRGRGKCYGPQCLCRGAGAAG |
| | G |
| SEQ ID NO: 791 | MCMPCFTTDHQMVRRCDDCCGGRGRGKCYGPQCLCRGAGAAG |
| | G |
| SEQ ID NO: 792 | MCMPCFTTDHQMVRKCDDCCGGKGRGVCYGPQCLCRGAGAAG |
| | G |
| SEQ ID NO: 793 | MCMPCFTTDHQMVRVCDDCCGGKGRGVCYGPQCLCRGAGAAG |
| | G |
| SEQ ID NO: 794 | MCMPCFTTDHQMVRRCDDCCGGKGRGVCYGPQCLCRGAGAAG |
| | G |
| SEQ ID NO: 795 | MCMPCFTTDHQMVRKCDDCCGGVGRGVCYGPQCLCRGAGAAG |
| | G |
| SEQ ID NO: 796 | MCMPCFTTDHQMVRVCDDCCGGVGRGVCYGPQCLCRGAGAAG |
| | G |
| SEQ ID NO: 797 | MCMPCFTTDHQMVRRCDDCCGGVGRGVCYGPQCLCRGAGAAG |
| | G |
| SEQ ID NO: 798 | MCMPCFTTDHQMVRKCDDCCGGRGRGVCYGPQCLCRGAGAAG |
| | G |
| SEQ ID NO: 799 | MCMPCFTTDHQMVRVCDDCCGGRGRGVCYGPQCLCRGAGAAG |
| | G |
| SEQ ID NO: 800 | MCMPCFTTDHQMVRRCDDCCGGRGRGVCYGPQCLCRGAGAAG |
| | G |
| SEQ ID NO: 801 | MCMPCFTTDHQMVRKCDDCCGGKGRGRCYGPQCLCRGAGAAG |
| | G |
| SEQ ID NO: 802 | MCMPCFTTDHQMVRVCDDCCGGKGRGRCYGPQCLCRGAGAAG |
| | G |
| SEQ ID NO: 803 | MCMPCFTTDHQMVRRCDDCCGGKGRGRCYGPQCLCRGAGAAG |
| | G |
| SEQ ID NO: 804 | MCMPCFTTDHQMVRKCDDCCGGVGRGRCYGPQCLCRGAGAAG |
| | G |
| SEQ ID NO: 805 | MCMPCFTTDHQMVRVCDDCCGGVGRGRCYGPQCLCRGAGAAG |
| | G |
| SEQ ID NO: 806 | MCMPCFTTDHQMVRRCDDCCGGVGRGRCYGPQCLCRGAGAAG |
| | G |
| SEQ ID NO: 807 | MCMPCFTTDHQMVRKCDDCCGGRGRGRCYGPQCLCRGAGAAG |
| | G |
| SEQ ID NO: 808 | MCMPCFTTDHQMVRVCDDCCGGRGRGRCYGPQCLCRGAGAAG |
| | G |
| SEQ ID NO: 809 | MCMPCFTTDHQMVRRCDDCCGGRGRGRCYGPQCLCRGAGAAG |
| | G |
| SEQ ID NO: 810 | KCNIPCFTTDHQMVRRCDDCCGGRGRGRCYGPQCLCRGAGAAG |
| | G |
| SEQ ID NO: 811 | VCVPCFTTDHQVVRRCDDCCGGRGRGRCYGPQCLCRGAGAAGG |
| SEQ ID NO: 812 | KCVPCFTTDHQVVRRCDDCCGGRGRGRCYGPQCLCRGAGAAGG |
| SEQ ID NO: 813 | MCMPCFTTDHQMVR(Cit)CDDCCGG(Cit)GRGKCYGPQCLCRGA |
| | GAAGG |
| SEQ ID NO: 814 | MCMPCFTTDHQMVR(Cit)CDDCCGG(Cit)GRG(Cit)CYGPQCL |
| | CRGAGAAGG |
| SEQ ID NO: 815 | KCNIPCFTTDHQMVR(Cit)CDDCCGG(Cit)GRG(Cit)CYGPQCL |
| | CRGAGAAGG |
| SEQ ID NO: 816 | VCVPCFTTDHQVVR(Cit)CDDCCGG(Cit)GRGKCYGPQCLCRGAG |
| | AAGG |
| SEQ ID NO: 817 | VCVPCFTTDHQVVR(Cit)CDDCCGG(Cit)GRG(Cit)CYGPQCLC |
| | RGAGAAGG |
| SEQ ID NO: 818 | KCVPCFTTDHQVVR(Cit)CDDCCGG(Cit)GRG(Cit)CYGPQCLC |
| | RGAGAAGG |
| SEQ ID NO: 819 | MCMPCFTTDHQMLRKCDDCCGGKGRGKCYGPQCLCR |
| SEQ ID NO: 820 | MCMPCFTTDHQMLRLCDDCCGGKGRGKCYGPQCLCR |
| SEQ ID NO: 821 | MCMPCFTTDHQMLRRCDDCCGGKGRGKCYGPQCLCR |
| SEQ ID NO: 822 | MCMPCFTTDHQMLRKCDDCCGGLGRGKCYGPQCLCR |
| SEQ ID NO: 823 | MCMPCFTTDHQMLRLCDDCCGGLGRGKCYGPQCLCR |
| SEQ ID NO: 824 | MCMPCFTTDHQMLRRCDDCCGGLGRGKCYGPQCLCR |
| SEQ ID NO: 825 | MCMPCFTTDHQMLRKCDDCCGGRGRGKCYGPQCLCR |
| SEQ ID NO: 826 | MCMPCFTTDHQMLRLCDDCCGGRGRGKCYGPQCLCR |
| SEQ ID NO: 827 | MCMPCFTTDHQMLRRCDDCCGGRGRGKCYGPQCLCR |
| SEQ ID NO: 828 | MCMPCFTTDHQMLRKCDDCCGGKGRGLCYGPQCLCR |
| SEQ ID NO: 829 | MCMPCFTTDHQMLRLCDDCCGGKGRGLCYGPQCLCR |
| SEQ ID NO: 830 | MCMPCFTTDHQMLRRCDDCCGGKGRGLCYGPQCLCR |
| SEQ ID NO: 831 | MCMPCFTTDHQMLRKCDDCCGGLGRGLCYGPQCLCR |
| SEQ ID NO: 832 | MCMPCFTTDHQMLRLCDDCCGGLGRGLCYGPQCLCR |
| SEQ ID NO: 833 | MCMPCFTTDHQMLRRCDDCCGGLGRGLCYGPQCLCR |
| SEQ ID NO: 834 | MCMPCFTTDHQMLRKCDDCCGGRGRGLCYGPQCLCR |
| SEQ ID NO: 835 | MCMPCFTTDHQMLRLCDDCCGGRGRGLCYGPQCLCR |
| SEQ ID NO: 836 | MCMPCFTTDHQMLRRCDDCCGGRGRGLCYGPQCLCR |
| SEQ ID NO: 837 | MCMPCFTTDHQMLRKCDDCCGGKGRGRCYGPQCLCR |
| SEQ ID NO: 838 | MCMPCFTTDHQMLRLCDDCCGGKGRGRCYGPQCLCR |
| SEQ ID NO: 839 | MCMPCFTTDHQMLRRCDDCCGGKGRGRCYGPQCLCR |
| SEQ ID NO: 840 | MCMPCFTTDHQMLRKCDDCCGGLGRGRCYGPQCLCR |
| SEQ ID NO: 841 | MCMPCFTTDHQMLRLCDDCCGGLGRGRCYGPQCLCR |
| SEQ ID NO: 842 | MCMPCFTTDHQMLRRCDDCCGGLGRGRCYGPQCLCR |
| SEQ ID NO: 843 | MCMPCFTTDHQMLRKCDDCCGGRGRGRCYGPQCLCR |
| SEQ ID NO: 844 | MCMPCFTTDHQMLRLCDDCCGGRGRGRCYGPQCLCR |
| SEQ ID NO: 845 | MCMPCFTTDHQMLRRCDDCCGGRGRGRCYGPQCLCR |
| SEQ ID NO: 846 | KCNIPCFTTDHQMLRRCDDCCGGRGRGRCYGPQCLCR |
| SEQ ID NO: 847 | LCLPCFTTDHQLLRRCDDCCGGRGRGRCYGPQCLCR |
| SEQ ID NO: 848 | KCLPCFTTDHQLLRRCDDCCGGRGRGRCYGPQCLCR |
| SEQ ID NO: 849 | MCMPCFTTDHQMLR(Cit)CDDCCGG(Cit)GRGKCYGPQCLCR |
| SEQ ID NO: 850 | MCMPCFTTDHQMLR(Cit)CDDCCGG(Cit)GRG(Cit)CYGPQCLCR |
| SEQ ID NO: 851 | KCNIPCFTTDHQMLR(Cit)CDDCCGG(Cit)GRG(Cit)CYGPQCLCR |
| SEQ ID NO: 852 | LCLPCFTTDHQLLR(Cit)CDDCCGG(Cit)GRGKCYGPQCLCR |
| SEQ ID NO: 853 | LCLPCFTTDHQLLR(Cit)CDDCCGG(Cit)GRG(Cit)CYGPQCLCR |
| SEQ ID NO: 854 | KCLPCFTTDHQLLR(Cit)CDDCCGG(Cit)GRG(Cit)CYGPQCLCR |
| SEQ ID NO: 855 | MCMPCFTTDHQMLRKCDDCCGGKGRGKCYGPQCLCRGAGAAG |
| | G |
| SEQ ID NO: 856 | MCMPCFTTDHQMLRLCDDCCGGKGRGKCYGPQCLCRGAGAAG |
| | G |
| SEQ ID NO: 857 | MCMPCFTTDHQMLRRCDDCCGGKGRGKCYGPQCLCRGAGAAG |
| | G |
| SEQ ID NO: 858 | MCMPCFTTDHQMLRKCDDCCGGLGRGKCYGPQCLCRGAGAAG |
| | G |
| SEQ ID NO: 859 | MCMPCFTTDHQMLRLCDDCCGGLGRGKCYGPQCLCRGAGAAG |
| | G |
| SEQ ID NO: 860 | MCMPCFTTDHQMLRRCDDCCGGLGRGKCYGPQCLCRGAGAAG |
| | G |
| SEQ ID NO: 861 | MCMPCFTTDHQMLRKCDDCCGGRGRGKCYGPQCLCRGAGAAG |
| | G |
| SEQ ID NO: 862 | MCMPCFTTDHQMLRLCDDCCGGRGRGKCYGPQCLCRGAGAAG |
| | G |
| SEQ ID NO: 863 | MCMPCFTTDHQMLRRCDDCCGGRGRGKCYGPQCLCRGAGAAG |
| | G |
| SEQ ID NO: 864 | MCMPCFTTDHQMLRKCDDCCGGKGRGLCYGPQCLCRGAGAAG |
| | G |
| SEQ ID NO: 865 | MCMPCFTTDHQMLRLCDDCCGGKGRGLCYGPQCLCRGAGAAG |
| | G |
| SEQ ID NO: 866 | MCMPCFTTDHQMLRRCDDCCGGKGRGLCYGPQCLCRGAGAAG |
| | G |
| SEQ ID NO: 867 | MCMPCFTTDHQMLRKCDDCCGGLGRGLCYGPQCLCRGAGAAG |
| | G |
| SEQ ID NO: 868 | MCMPCFTTDHQMLRLCDDCCGGLGRGLCYGPQCLCRGAGAAG |
| | G |
| SEQ ID NO: 869 | MCMPCFTTDHQMLRRCDDCCGGLGRGLCYGPQCLCRGAGAAG |
| | G |
| SEQ ID NO: 870 | MCMPCFTTDHQMLRKCDDCCGGRGRGLCYGPQCLCRGAGAAG |
| | G |
| SEQ ID NO: 871 | MCMPCFTTDHQMLRLCDDCCGGRGRGLCYGPQCLCRGAGAAG |
| | G |
| SEQ ID NO: 872 | MCMPCFTTDHQMLRRCDDCCGGRGRGLCYGPQCLCRGAGAAG |
| | G |
| SEQ ID NO: 873 | MCMPCFTTDHQMLRKCDDCCGGKGRGRCYGPQCLCRGAGAAG |
| | G |
| SEQ ID NO: 874 | MCMPCFTTDHQMLRLCDDCCGGKGRGRCYGPQCLCRGAGAAG |
| | G |
| SEQ ID NO: 875 | MCMPCFTTDHQMLRRCDDCCGGKGRGRCYGPQCLCRGAGAAG |
| | G |
| SEQ ID NO: 876 | MCMPCFTTDHQMLRKCDDCCGGLGRGRCYGPQCLCRGAGAAG |
| | G |
| SEQ ID NO: 877 | MCMPCFTTDHQMLRLCDDCCGGLGRGRCYGPQCLCRGAGAAG |
| | G |
| SEQ ID NO: 878 | MCMPCFTTDHQMLRRCDDCCGGLGRGRCYGPQCLCRGAGAAG |
| | G |
| SEQ ID NO: 879 | MCMPCFTTDHQMLRKCDDCCGGRGRGRCYGPQCLCRGAGAAG |
| | G |
| SEQ ID NO: 880 | MCMPCFTTDHQMLRLCDDCCGGRGRGRCYGPQCLCRGAGAAG |
| | G |
| SEQ ID NO: 881 | MCMPCFTTDHQMLRRCDDCCGGRGRGRCYGPQCLCRGAGAAG |
| | G |
| SEQ ID NO: 882 | KCMPCFTTDHQMLRRCDDCCGGRGRGRCYGPQCLCRGAGAAG |
| | G |
| SEQ ID NO: 883 | LCLPCFTTDHQLLRRCDDCCGGRGRGRCYGPQCLCRGAGAAGG |
| SEQ ID NO: 884 | KCLPCFTTDHQLLRRCDDCCGGRGRGRCYGPQCLCRGAGAAGG |
| SEQ ID NO: 885 | MCMPCFTTDHQMLR(Cit)CDDCCGG(Cit)GRGKCYGPQCLCR |
| | GAGAAGG |
| SEQ ID NO: 886 | MCMPCFTTDHQMLR(Cit)CDDCCGG(Cit)GRG(Cit)CYGPQC |
| | LCRGAGAAGG |
| SEQ ID NO: 887 | KCNIPCFTTDHQMLR(Cit)CDDCCGG(Cit)GRG(Cit)CYGPQ |
| | CLCRGAGAAGG |
| SEQ ID NO: 888 | LCLPCFTTDHQLLR(Cit)CDDCCGG(Cit)GRGKCYGPQCLCRG |
| | AGAAGG |
| SEQ ID NO: 889 | LCLPCFTTDHQLLR(Cit)CDDCCGG(Cit)GRG(Cit)CYGPQC |
| | LCRGAGAAGG |
| SEQ ID NO: 890 | KCLPCFTTDHQLLR(Cit)CDDCCGG(Cit)GRG(Cit)CYGPQC |
| | LCRGAGAAGG |
| SEQ ID NO: 891 | GCGPCFTTDHQGARKCDDCCGGKGRGKCYGPQCLCR |
| SEQ ID NO: 892 | GCGPCFTTDHQGARACDDCCGGKGRGKCYGPQCLCR |
| SEQ ID NO: 893 | GCGPCFTTDHQGARRCDDCCGGKGRGKCYGPQCLCR |
| SEQ ID NO: 894 | GCGPCFTTDHQGARKCDDCCGGAGRGKCYGPQCLCR |
| SEQ ID NO: 895 | GCGPCFTTDHQGARACDDCCGGAGRGKCYGPQCLCR |
| SEQ ID NO: 896 | GCGPCFTTDHQGARRCDDCCGGAGRGKCYGPQCLCR |
| SEQ ID NO: 897 | GCGPCFTTDHQGARKCDDCCGGRGRGKCYGPQCLCR |
| SEQ ID NO: 898 | GCGPCFTTDHQGARACDDCCGGRGRGKCYGPQCLCR |
| SEQ ID NO: 899 | GCGPCFTTDHQGARRCDDCCGGRGRGKCYGPQCLCR |
| SEQ ID NO: 900 | GCGPCFTTDHQGARKCDDCCGGKGRGACYGPQCLCR |
| SEQ ID NO: 901 | GCGPCFTTDHQGARACDDCCGGKGRGACYGPQCLCR |
| SEQ ID NO: 902 | GCGPCFTTDHQGARRCDDCCGGKGRGACYGPQCLCR |
| SEQ ID NO: 903 | GCGPCFTTDHQGARKCDDCCGGAGRGACYGPQCLCR |
| SEQ ID NO: 904 | GCGPCFTTDHQGARACDDCCGGAGRGACYGPQCLCR |
| SEQ ID NO: 905 | GCGPCFTTDHQGARRCDDCCGGAGRGACYGPQCLCR |
| SEQ ID NO: 906 | GCGPCFTTDHQGARKCDDCCGGRGRGACYGPQCLCR |
| SEQ ID NO: 907 | GCGPCFTTDHQGARACDDCCGGRGRGACYGPQCLCR |
| SEQ ID NO: 908 | GCGPCFTTDHQGARRCDDCCGGRGRGACYGPQCLCR |
| SEQ ID NO: 909 | GCGPCFTTDHQGARKCDDCCGGKGRGRCYGPQCLCR |
| SEQ ID NO: 910 | GCGPCFTTDHQGARACDDCCGGKGRGRCYGPQCLCR |
| SEQ ID NO: 911 | GCGPCFTTDHQGARRCDDCCGGKGRGRCYGPQCLCR |
| SEQ ID NO: 912 | GCGPCFTTDHQGARKCDDCCGGAGRGRCYGPQCLCR |
| SEQ ID NO: 913 | GCGPCFTTDHQGARACDDCCGGAGRGRCYGPQCLCR |
| SEQ ID NO: 914 | GCGPCFTTDHQGARRCDDCCGGAGRGRCYGPQCLCR |
| SEQ ID NO: 915 | GCGPCFTTDHQGARKCDDCCGGRGRGRCYGPQCLCR |
| SEQ ID NO: 916 | GCGPCFTTDHQGARACDDCCGGRGRGRCYGPQCLCR |
| SEQ ID NO: 917 | GCGPCFTTDHQGARRCDDCCGGRGRGRCYGPQCLCR |
| SEQ ID NO: 918 | KCGPCFTTDHQGARRCDDCCGGRGRGRCYGPQCLCR |
| SEQ ID NO: 919 | GCGPCFTTDHQGAR(Cit)CDDCCGG(Cit)GRGKCYGPQCLCR |
| SEQ ID NO: 920 | GCGPCFTTDHQGAR(Cit)CDDCCGG(Cit)GRG(Cit)CYGPQCLCR |
| SEQ ID NO: 921 | KCGPCFTTDHQGAR(Cit)CDDCCGG(Cit)GRG(Cit)CYGPQCLCR |
| SEQ ID NO: 922 | ACAPCFTTDHQAARACDDCCGGKGRGKCYGPQCLCR |
| SEQ ID NO: 923 | ACAPCFTTDHQAARRCDDCCGGKGRGKCYGPQCLCR |
| SEQ ID NO: 924 | ACAPCFTTDHQAARKCDDCCGGAGRGKCYGPQCLCR |
| SEQ ID NO: 925 | ACAPCFTTDHQAARACDDCCGGAGRGKCYGPQCLCR |
| SEQ ID NO: 926 | ACAPCFTTDHQAARRCDDCCGGAGRGKCYGPQCLCR |
| SEQ ID NO: 927 | ACAPCFTTDHQAARKCDDCCGGRGRGKCYGPQCLCR |
| SEQ ID NO: 928 | ACAPCFTTDHQAARACDDCCGGRGRGKCYGPQCLCR |
| SEQ ID NO: 929 | ACAPCFTTDHQAARKCDDCCGGKGRGACYGPQCLCR |
| SEQ ID NO: 930 | ACAPCFTTDHQAARACDDCCGGKGRGACYGPQCLCR |
| SEQ ID NO: 931 | ACAPCFTTDHQAARRCDDCCGGKGRGACYGPQCLCR |
| SEQ ID NO: 932 | ACAPCFTTDHQAARKCDDCCGGAGRGACYGPQCLCR |
| SEQ ID NO: 933 | ACAPCFTTDHQAARACDDCCGGAGRGACYGPQCLCR |
| SEQ ID NO: 934 | ACAPCFTTDHQAARRCDDCCGGAGRGACYGPQCLCR |
| SEQ ID NO: 935 | ACAPCFTTDHQAARKCDDCCGGRGRGACYGPQCLCR |
| SEQ ID NO: 936 | ACAPCFTTDHQAARACDDCCGGRGRGACYGPQCLCR |
| SEQ ID NO: 937 | ACAPCFTTDHQAARRCDDCCGGRGRGACYGPQCLCR |
| SEQ ID NO: 938 | ACAPCFTTDHQAARKCDDCCGGKGRGRCYGPQCLCR |
| SEQ ID NO: 939 | ACAPCFTTDHQAARACDDCCGGKGRGRCYGPQCLCR |
| SEQ ID NO: 940 | ACAPCFTTDHQAARRCDDCCGGKGRGRCYGPQCLCR |
| SEQ ID NO: 941 | ACAPCFTTDHQAARKCDDCCGGAGRGRCYGPQCLCR |
| SEQ ID NO: 942 | ACAPCFTTDHQAARACDDCCGGAGRGRCYGPQCLCR |
| SEQ ID NO: 943 | ACAPCFTTDHQAARRCDDCCGGAGRGRCYGPQCLCR |
| SEQ ID NO: 944 | ACAPCFTTDHQAARKCDDCCGGRGRGRCYGPQCLCR |
| SEQ ID NO: 945 | ACAPCFTTDHQAARACDDCCGGRGRGRCYGPQCLCR |
| SEQ ID NO: 946 | ICIPCFTTDHQIARKCDDCCGGKGRGKCYGPQCLCR |
| SEQ ID NO: 947 | ICIPCFTTDHQIARACDDCCGGKGRGKCYGPQCLCR |
| SEQ ID NO: 948 | ICIPCFTTDHQIARRCDDCCGGKGRGKCYGPQCLCR |
| SEQ ID NO: 949 | ICIPCFTTDHQIARKCDDCCGGAGRGKCYGPQCLCR |
| SEQ ID NO: 950 | ICIPCFTTDHQIARACDDCCGGAGRGKCYGPQCLCR |
| SEQ ID NO: 951 | ICIPCFTTDHQIARRCDDCCGGAGRGKCYGPQCLCR |
| SEQ ID NO: 952 | ICIPCFTTDHQIARKCDDCCGGRGRGKCYGPQCLCR |
| SEQ ID NO: 953 | ICIPCFTTDHQIARACDDCCGGRGRGKCYGPQCLCR |
| SEQ ID NO: 954 | ICIPCFTTDHQIARKCDDCCGGKGRGACYGPQCLCR |
| SEQ ID NO: 955 | ICIPCFTTDHQIARACDDCCGGKGRGACYGPQCLCR |
| SEQ ID NO: 956 | ICIPCFTTDHQIARRCDDCCGGKGRGACYGPQCLCR |
| SEQ ID NO: 957 | ICIPCFTTDHQIARKCDDCCGGAGRGACYGPQCLCR |
| SEQ ID NO: 958 | ICIPCFTTDHQIARACDDCCGGAGRGACYGPQCLCR |
| SEQ ID NO: 959 | ICIPCFTTDHQIARRCDDCCGGAGRGACYGPQCLCR |
| SEQ ID NO: 960 | ICIPCFTTDHQIARKCDDCCGGRGRGACYGPQCLCR |
| SEQ ID NO: 961 | ICIPCFTTDHQIARACDDCCGGRGRGACYGPQCLCR |
| SEQ ID NO: 962 | ICIPCFTTDHQIARRCDDCCGGRGRGACYGPQCLCR |
| SEQ ID NO: 963 | ICIPCFTTDHQIARKCDDCCGGKGRGRCYGPQCLCR |
| SEQ ID NO: 964 | ICIPCFTTDHQIARACDDCCGGKGRGRCYGPQCLCR |
| SEQ ID NO: 965 | ICIPCFTTDHQIARRCDDCCGGKGRGRCYGPQCLCR |
| SEQ ID NO: 966 | ICIPCFTTDHQIARKCDDCCGGAGRGRCYGPQCLCR |
| SEQ ID NO: 967 | ICIPCFTTDHQIARACDDCCGGAGRGRCYGPQCLCR |
| SEQ ID NO: 968 | ICIPCFTTDHQIARRCDDCCGGAGRGRCYGPQCLCR |
| SEQ ID NO: 969 | ICIPCFTTDHQIARKCDDCCGGRGRGRCYGPQCLCR |
| SEQ ID NO: 970 | ICIPCFTTDHQIARACDDCCGGRGRGRCYGPQCLCR |
| SEQ ID NO: 971 | ICIPCFTTDHQIARRCDDCCGGRGRGRCYGPQCLCR |
| SEQ ID NO: 972 | KCIPCFTTDHQIARRCDDCCGGRGRGRCYGPQCLCR |
| SEQ ID NO: 973 | ICIPCFTTDHQIAR(Cit)CDDCCGG(Cit)GRGKCYGPQCLCR |
| SEQ ID NO: 974 | ICIPCFTTDHQIAR(Cit)CDDCCGG(Cit)GRG(Cit)CYGPQCLCR |
| SEQ ID NO: 975 | KCIPCFTTDHQIAR(Cit)CDDCCGG(Cit)GRG(Cit)CYGPQCLCR |
| SEQ ID NO: 976 | TCTPCFTTDHQTARKCDDCCGGKGRGKCYGPQCLCR |
| SEQ ID NO: 977 | TCTPCFTTDHQTARACDDCCGGKGRGKCYGPQCLCR |
| SEQ ID NO: 978 | TCTPCFTTDHQTARRCDDCCGGKGRGKCYGPQCLCR |
| SEQ ID NO: 979 | TCTPCFTTDHQTARKCDDCCGGAGRGKCYGPQCLCR |
| SEQ ID NO: 980 | TCTPCFTTDHQTARACDDCCGGAGRGKCYGPQCLCR |
| SEQ ID NO: 981 | TCTPCFTTDHQTARRCDDCCGGAGRGKCYGPQCLCR |
| SEQ ID NO: 982 | TCTPCFTTDHQTARKCDDCCGGRGRGKCYGPQCLCR |
| SEQ ID NO: 983 | TCTPCFTTDHQTARACDDCCGGRGRGKCYGPQCLCR |
| SEQ ID NO: 984 | TCTPCFTTDHQTARRCDDCCGGRGRGKCYGPQCLCR |
| SEQ ID NO: 985 | TCTPCFTTDHQTARKCDDCCGGKGRGACYGPQCLCR |
| SEQ ID NO: 986 | TCTPCFTTDHQTARACDDCCGGKGRGACYGPQCLCR |
| SEQ ID NO: 987 | TCTPCFTTDHQTARRCDDCCGGKGRGACYGPQCLCR |
| SEQ ID NO: 988 | TCTPCFTTDHQTARKCDDCCGGAGRGACYGPQCLCR |
| SEQ ID NO: 989 | TCTPCFTTDHQTARACDDCCGGAGRGACYGPQCLCR |
| SEQ ID NO: 990 | TCTPCFTTDHQTARRCDDCCGGAGRGACYGPQCLCR |
| SEQ ID NO: 991 | TCTPCFTTDHQTARKCDDCCGGRGRGACYGPQCLCR |
| SEQ ID NO: 992 | TCTPCFTTDHQTARACDDCCGGRGRGACYGPQCLCR |
| SEQ ID NO: 993 | TCTPCFTTDHQTARRCDDCCGGRGRGACYGPQCLCR |
| SEQ ID NO: 994 | TCTPCFTTDHQTARKCDDCCGGKGRGRCYGPQCLCR |
| SEQ ID NO: 995 | TCTPCFTTDHQTARACDDCCGGKGRGRCYGPQCLCR |
| SEQ ID NO: 996 | TCTPCFTTDHQTARRCDDCCGGKGRGRCYGPQCLCR |
| SEQ ID NO: 997 | TCTPCFTTDHQTARKCDDCCGGAGRGRCYGPQCLCR |
| SEQ ID NO: 998 | TCTPCFTTDHQTARACDDCCGGAGRGRCYGPQCLCR |
| SEQ ID NO: 999 | TCTPCFTTDHQTARRCDDCCGGAGRGRCYGPQCLCR |
| SEQ ID NO: 1000 | TCTPCFTTDHQTARKCDDCCGGRGRGRCYGPQCLCR |
| SEQ ID NO: 1001 | TCTPCFTTDHQTARACDDCCGGRGRGRCYGPQCLCR |
| SEQ ID NO: 1002 | TCTPCFTTDHQTARRCDDCCGGRGRGRCYGPQCLCR |
| SEQ ID NO: 1003 | KCTPCFTTDHQTARRCDDCCGGRGRGRCYGPQCLCR |
| SEQ ID NO: 1004 | TCTPCFTTDHQTAR(Cit)CDDCCGG(Cit)GRGKCYGPQCLCR |
| SEQ ID NO: 1005 | TCTPCFTTDHQTAR(Cit)CDDCCGG(Cit)GRG(Cit)CYGPQCLCR |
| SEQ ID NO: 1006 | KCTPCFTTDHQTAR(Cit)CDDCCGG(Cit)GRG(Cit)CYGPQCLCR |
| SEQ ID NO: 1007 | VCVPCFTTDHQVARKCDDCCGGKGRGKCYGPQCLCR |
| SEQ ID NO: 1008 | VCVPCFTTDHQVARACDDCCGGKGRGKCYGPQCLCR |
| SEQ ID NO: 1009 | VCVPCFTTDHQVARRCDDCCGGKGRGKCYGPQCLCR |
| SEQ ID NO: 1010 | VCVPCFTTDHQVARKCDDCCGGAGRGKCYGPQCLCR |
| SEQ ID NO: 1011 | VCVPCFTTDHQVARACDDCCGGAGRGKCYGPQCLCR |
| SEQ ID NO: 1012 | VCVPCFTTDHQVARRCDDCCGGAGRGKCYGPQCLCR |
| SEQ ID NO: 1013 | VCVPCFTTDHQVARKCDDCCGGRGRGKCYGPQCLCR |
| SEQ ID NO: 1014 | VCVPCFTTDHQVARACDDCCGGRGRGKCYGPQCLCR |
| SEQ ID NO: 1015 | VCVPCFTTDHQVARRCDDCCGGRGRGKCYGPQCLCR |
| SEQ ID NO: 1016 | VCVPCFTTDHQVARKCDDCCGGKGRGACYGPQCLCR |
| SEQ ID NO: 1017 | VCVPCFTTDHQVARACDDCCGGKGRGACYGPQCLCR |
| SEQ ID NO: 1018 | VCVPCFTTDHQVARRCDDCCGGKGRGACYGPQCLCR |
| SEQ ID NO: 1019 | VCVPCFTTDHQVARKCDDCCGGAGRGACYGPQCLCR |
| SEQ ID NO: 1020 | VCVPCFTTDHQVARACDDCCGGAGRGACYGPQCLCR |
| SEQ ID NO: 1021 | VCVPCFTTDHQVARRCDDCCGGAGRGACYGPQCLCR |
| SEQ ID NO: 1022 | VCVPCFTTDHQVARKCDDCCGGRGRGACYGPQCLCR |
| SEQ ID NO: 1023 | VCVPCFTTDHQVARACDDCCGGRGRGACYGPQCLCR |
| SEQ ID NO: 1024 | VCVPCFTTDHQVARRCDDCCGGRGRGACYGPQCLCR |
| SEQ ID NO: 1025 | VCVPCFTTDHQVARKCDDCCGGKGRGRCYGPQCLCR |
| SEQ ID NO: 1026 | VCVPCFTTDHQVARACDDCCGGKGRGRCYGPQCLCR |
| SEQ ID NO: 1027 | VCVPCFTTDHQVARRCDDCCGGKGRGRCYGPQCLCR |
| SEQ ID NO: 1028 | VCVPCFTTDHQVARKCDDCCGGAGRGRCYGPQCLCR |
| SEQ ID NO: 1029 | VCVPCFTTDHQVARACDDCCGGAGRGRCYGPQCLCR |
| SEQ ID NO: 1030 | VCVPCFTTDHQVARRCDDCCGGAGRGRCYGPQCLCR |
| SEQ ID NO: 1031 | VCVPCFTTDHQVARKCDDCCGGRGRGRCYGPQCLCR |
| SEQ ID NO: 1032 | VCVPCFTTDHQVARACDDCCGGRGRGRCYGPQCLCR |
| SEQ ID NO: 1033 | VCVPCFTTDHQVARRCDDCCGGRGRGRCYGPQCLCR |
| SEQ ID NO: 1034 | KCVPCFTTDHQVARRCDDCCGGRGRGRCYGPQCLCR |
| SEQ ID NO: 1035 | VCVPCFTTDHQVAR(Cit)CDDCCGG(Cit)GRGKCYGPQCLCR |
| SEQ ID NO: 1036 | VCVPCFTTDHQVAR(Cit)CDDCCGG(Cit)GRG(Cit)CYGPQCLCR |
| SEQ ID NO: 1037 | KCVPCFTTDHQVAR(Cit)CDDCCGG(Cit)GRG(Cit)CYGPQCLCR |
| SEQ ID NO: 1038 | LCLPCFTTDHQLARKCDDCCGGKGRGKCYGPQCLCR |
| SEQ ID NO: 1039 | LCLPCFTTDHQLARACDDCCGGKGRGKCYGPQCLCR |
| SEQ ID NO: 1040 | LCLPCFTTDHQLARRCDDCCGGKGRGKCYGPQCLCR |
| SEQ ID NO: 1041 | LCLPCFTTDHQLARKCDDCCGGAGRGKCYGPQCLCR |
| SEQ ID NO: 1042 | LCLPCFTTDHQLARACDDCCGGAGRGKCYGPQCLCR |
| SEQ ID NO: 1043 | LCLPCFTTDHQLARRCDDCCGGAGRGKCYGPQCLCR |
| SEQ ID NO: 1044 | LCLPCFTTDHQLARKCDDCCGGRGRGKCYGPQCLCR |
| SEQ ID NO: 1045 | LCLPCFTTDHQLARACDDCCGGRGRGKCYGPQCLCR |
| SEQ ID NO: 1046 | LCLPCFTTDHQLARRCDDCCGGRGRGKCYGPQCLCR |
| SEQ ID NO: 1047 | LCLPCFTTDHQLARKCDDCCGGKGRGACYGPQCLCR |
| SEQ ID NO: 1048 | LCLPCFTTDHQLARACDDCCGGKGRGACYGPQCLCR |
| SEQ ID NO: 1049 | LCLPCFTTDHQLARRCDDCCGGKGRGACYGPQCLCR |
| SEQ ID NO: 1050 | LCLPCFTTDHQLARKCDDCCGGAGRGACYGPQCLCR |
| SEQ ID NO: 1051 | LCLPCFTTDHQLARACDDCCGGAGRGACYGPQCLCR |
| SEQ ID NO: 1052 | LCLPCFTTDHQLARRCDDCCGGAGRGACYGPQCLCR |
| SEQ ID NO: 1053 | LCLPCFTTDHQLARKCDDCCGGRGRGACYGPQCLCR |
| SEQ ID NO: 1054 | LCLPCFTTDHQLARACDDCCGGRGRGACYGPQCLCR |
| SEQ ID NO: 1055 | LCLPCFTTDHQLARRCDDCCGGRGRGACYGPQCLCR |
| SEQ ID NO: 1056 | LCLPCFTTDHQLARKCDDCCGGKGRGRCYGPQCLCR |
| SEQ ID NO: 1057 | LCLPCFTTDHQLARACDDCCGGKGRGRCYGPQCLCR |
| SEQ ID NO: 1058 | LCLPCFTTDHQLARRCDDCCGGKGRGRCYGPQCLCR |
| SEQ ID NO: 1059 | LCLPCFTTDHQLARKCDDCCGGAGRGRCYGPQCLCR |
| SEQ ID NO: 1060 | LCLPCFTTDHQLARACDDCCGGAGRGRCYGPQCLCR |
| SEQ ID NO: 1061 | LCLPCFTTDHQLARRCDDCCGGAGRGRCYGPQCLCR |
| SEQ ID NO: 1062 | LCLPCFTTDHQLARKCDDCCGGRGRGRCYGPQCLCR |
| SEQ ID NO: 1063 | LCLPCFTTDHQLARACDDCCGGRGRGRCYGPQCLCR |
| SEQ ID NO: 1064 | LCLPCFTTDHQLARRCDDCCGGRGRGRCYGPQCLCR |
| SEQ ID NO: 1065 | KCLPCFTTDHQLARRCDDCCGGRGRGRCYGPQCLCR |
| SEQ ID NO: 1066 | LCLPCFTTDHQLAR(Cit)CDDCCGG(Cit)GRGKCYGPQCLCR |
| SEQ ID NO: 1067 | LCLPCFTTDHQLAR(Cit)CDDCCGG(Cit)GRG(Cit)CYGPQCLCR |
| SEQ ID NO: 1068 | KCLPCFTTDHQLAR(Cit)CDDCCGG(Cit)GRG(Cit)CYGPQCLCR |
| SEQ ID NO: 1069 | SCSPCFTTDHQSARKCDDCCGGKGRGKCYGPQCLCR |
| SEQ ID NO: 1070 | SCSPCFTTDHQSARACDDCCGGKGRGKCYGPQCLCR |
| SEQ ID NO: 1071 | SCSPCFTTDHQSARRCDDCCGGKGRGKCYGPQCLCR |
| SEQ ID NO: 1072 | SCSPCFTTDHQSARKCDDCCGGAGRGKCYGPQCLCR |
| SEQ ID NO: 1073 | SCSPCFTTDHQSARACDDCCGGAGRGKCYGPQCLCR |
| SEQ ID NO: 1074 | SCSPCFTTDHQSARRCDDCCGGAGRGKCYGPQCLCR |
| SEQ ID NO: 1075 | SCSPCFTTDHQSARKCDDCCGGRGRGKCYGPQCLCR |
| SEQ ID NO: 1076 | SCSPCFTTDHQSARACDDCCGGRGRGKCYGPQCLCR |
| SEQ ID NO: 1077 | SCSPCFTTDHQSARRCDDCCGGRGRGKCYGPQCLCR |
| SEQ ID NO: 1078 | SCSPCFTTDHQSARKCDDCCGGKGRGACYGPQCLCR |
| SEQ ID NO: 1079 | SCSPCFTTDHQSARACDDCCGGKGRGACYGPQCLCR |
| SEQ ID NO: 1080 | SCSPCFTTDHQSARRCDDCCGGKGRGACYGPQCLCR |
| SEQ ID NO: 1081 | SCSPCFTTDHQSARKCDDCCGGAGRGACYGPQCLCR |
| SEQ ID NO: 1082 | SCSPCFTTDHQSARACDDCCGGAGRGACYGPQCLCR |
| SEQ ID NO: 1083 | SCSPCFTTDHQSARRCDDCCGGAGRGACYGPQCLCR |
| SEQ ID NO: 1084 | SCSPCFTTDHQSARKCDDCCGGRGRGACYGPQCLCR |
| SEQ ID NO: 1085 | SCSPCFTTDHQSARACDDCCGGRGRGACYGPQCLCR |
| SEQ ID NO: 1086 | SCSPCFTTDHQSARRCDDCCGGRGRGACYGPQCLCR |
| SEQ ID NO: 1087 | SCSPCFTTDHQSARKCDDCCGGKGRGRCYGPQCLCR |
| SEQ ID NO: 1088 | SCSPCFTTDHQSARACDDCCGGKGRGRCYGPQCLCR |
| SEQ ID NO: 1089 | SCSPCFTTDHQSARRCDDCCGGKGRGRCYGPQCLCR |
| SEQ ID NO: 1090 | SCSPCFTTDHQSARKCDDCCGGAGRGRCYGPQCLCR |
| SEQ ID NO: 1091 | SCSPCFTTDHQSARACDDCCGGAGRGRCYGPQCLCR |
| SEQ ID NO: 1092 | SCSPCFTTDHQSARRCDDCCGGAGRGRCYGPQCLCR |
| SEQ ID NO: 1093 | SCSPCFTTDHQSARKCDDCCGGRGRGRCYGPQCLCR |
| SEQ ID NO: 1094 | SCSPCFTTDHQSARACDDCCGGRGRGRCYGPQCLCR |
| SEQ ID NO: 1095 | SCSPCFTTDHQSARRCDDCCGGRGRGRCYGPQCLCR |
| SEQ ID NO: 1096 | KCSPCFTTDHQSARRCDDCCGGRGRGRCYGPQCLCR |
| SEQ ID NO: 1097 | SCSPCFTTDHQSAR(Cit)CDDCCGG(Cit)GRGKCYGPQCLCR |
| SEQ ID NO: 1098 | SCSPCFTTDHQSAR(Cit)CDDCCGG(Cit)GRG(Cit)CYGPQCLCR |
| SEQ ID NO: 1099 | KCSPCFTTDHQSAR(Cit)CDDCCGG(Cit)GRG(Cit)CYGPQCLCR |
| SEQ ID NO: 1100 | MCMPCFTTDPNMARKCRDCCGGNGKCFGPQCLCNRG |
| SEQ ID NO: 1101 | MCMPCFTTDHNMAKKCRDCCGGNGKCFGYQCLCNRG |
| SEQ ID NO: 1102 | MCMPCFTTDHQTARRCRDCCGGRGRKCFGQCLCGYD |
| SEQ ID NO: 1103 | ACGPCFTTDPQMAEKCSDCCGGIGTCYGPQCLCNRL |
| SEQ ID NO: 1104 | MCMPCFTTRPNMAQQCRDCCRGRGKCFGPQCLCG |
| SEQ ID NO: 1105 | MCMPCFTTRPNMAQQCRDCCRGRGKCFGPQCLCGYD |
| SEQ ID NO: 1106 | MCMPCFTTNLNMEQECRDCCGGTGRCFGPQCLCG |
| SEQ ID NO: 1107 | GCNIPCFTTDRYMARKCKECCRGYGNCFGPQCLCNRG |
| SEQ ID NO: 1108 | GCGPCFTTDANMARKCRECCGGNGKCFGPQCLCNRE |
| SEQ ID NO: 1109 | GCGPCFTTDANMARKCRECCGGIGKCFGPQCLCNRI |
| SEQ ID NO: 1110 | MCMPCFTTRPDMAQQCRACCKGRGKCFGPQCLCG |
| SEQ ID NO: 1111 | MCIPCFTTNPNMAAKCNACCGSRRGSCRGPQCIC |
| SEQ ID NO: 1112 | [sequence omitted] |
| SEQ ID NO: 1113 | CGPCFTTDPYTESKCATCCGGRGKCVGPQCLCNR |
| SEQ ID NO: 1114 | RCGPCFTTDPQTQAKCSECCGRKGGVCKGPQCICG |
| SEQ ID NO: 1115 | CGPCFTKDPETEKKCATCCGGIGRCFGPQCLCNRG |
| SEQ ID NO: 1116 | MCMPCFTTDHQMARRCDDCCGGRGRGKCWGPQCLCR |
| SEQ ID NO: 1117 | AMCMPCFTTDHNMAKKCRDCCGGNGKCFGPQCLCNRG |
| SEQ ID NO: 1118 | CGPCFTTDWESEKKCAECCGGIGRCFGPQCLCNRK |
| SEQ ID NO: 1119 | CGPCFTTDHQTEQKCAECCGGIGKCYGPQCLCRG |
| SEQ ID NO: 1120 | CGPCFTTDRQMEQKCAECCGGIGKCYGPQCLCRG |
| SEQ ID NO: 1121 | CGPCFTTDHQTEQKCAECCGGIGKCYGPQCLC |
| SEQ ID NO: 1122 | CNIPCFTTDHQMARKCDDCCGGRGKCYGPQCLCRG |
| SEQ ID NO: 1123 | RCGPCFTTDPQTQAKCSECCGRKGGVCKGPQCICGIQ |
| SEQ ID NO: 1124 | RCPPCFTTNPNMEADCRKCCGGRGYCASYQCICPG |
| SEQ ID NO: 1125 | CGPCFTTDHNMARKCDECCGGKGRGKCFGPQCLCR |
| SEQ ID NO: 1126 | VCNIPCFTTDQQMARKCSDCCGGKGRGKCYGPQCLCR |
| SEQ ID NO: 1127 | MCGPCFTTDANMARKCRECCGGIGKCFGPQCLCNRI |
| SEQ ID NO: 1128 | MCGPCFTTDANMAAACRECCGGIGKCFGPQCLCNRI |
| SEQ ID NO: 1129 | MCGPCFTTDANMARKCAECCGGIGKCFGPQCLCNRI |
| SEQ ID NO: 1130 | MCGPCFTTDANMARKCRECCGGIGACFGPQCLCNRI |
| SEQ ID NO: 1131 | MCGPCFTTDANMARKCRECCGGIGKCFGPQCLCNAI |
| SEQ ID NO: 1132 | CNIPCFTTRPNMAQQCRDCCRGRGKCFGPQCLCGYD |
| SEQ ID NO: 1133 | MCMPCFTTNLNMEQECRDCCGGTGRCFGPQCLCGYD |
| SEQ ID NO: 1134 | CNIPCFTTRPNMAQQCRDCCRGRGKCFGPQCLCGYD |
| SEQ ID NO: 1253 | EISCEPGKTFKDKCNTCRCGADGKSAACTLKACPNQ |
| SEQ ID NO: 1254 | SCEPGRTFRDRCNTCRCGADGRSAACTLRACPNQ |
| SEQ ID NO: 1255 | SCEPGRTFRDRCNTCKCGADGRSAACTLRACPNQ |
| SEQ ID NO: 1256 | SCEPGTTFRDRCNTCRCGSDGRSAACTLRACPQ |
| SEQ ID NO: 1257 | SCTPGTTFRDRCNTCRCSSNGRSAACTLRACPPGSY |
| SEQ ID NO: 1258 | SCTPGTTFRNRCNTCRCGSNGRSASCTLMACPPGSY |
| SEQ ID NO: 1259 | SCTPGATFRNRCNTCRCGSNGRSASCTLMACPPGSY |
| SEQ ID NO: 1260 | SCQPGTTYQRGCNTCRCLEDGQTEACTLRLC |
| SEQ ID NO: 1261 | SCTPGATYREGCNICRCRSDGRSGACTRRICPVDSN |
| SEQ ID NO: 1262 | SCQPGTTFRRDCNTCVCNRDGTNAACTLRACL |
| SEQ ID NO: 1263 | GSMCNIPCFTTDHQMARKCDDCCGGKGRGKCYGPQCLCR |
| SEQ ID NO: 1264 | GSACMPCFTTDHQMARKCDDCCGGKGRGKCYGPQCLCR |
| SEQ ID NO: 1265 | GSMCAPCFTTDHQMARKCDDCCGGKGRGKCYGPQCLCR |
| SEQ ID NO: 1266 | GSMCMACFTTDHQMARKCDDCCGGKGRGKCYGPQCLCR |
| SEQ ID NO: 1267 | GSMCNIPCATTDHQMARKCDDCCGGKGRGKCYGPQCLCR |
| SEQ ID NO: 1268 | GSMCNIPCFATDHQMARKCDDCCGGKGRGKCYGPQCLCR |
| SEQ ID NO: 1269 | GSMCNIPCFTADHQMARKCDDCCGGKGRGKCYGPQCLCR |
| SEQ ID NO: 1270 | GSMCNIPCFTTAHQMARKCDDCCGGKGRGKCYGPQCLCR |
| SEQ ID NO: 1271 | GSMCNIPCFTTDAQMARKCDDCCGGKGRGKCYGPQCLCR |
| SEQ ID NO: 1272 | GSMCNIPCFTTDHAMARKCDDCCGGKGRGKCYGPQCLCR |
| SEQ ID NO: 1273 | GSMCNIPCFTTDHQAARKCDDCCGGKGRGKCYGPQCLCR |
| SEQ ID NO: 1274 | GSMCNIPCFTTDHQMAAKCDDCCGGKGRGKCYGPQCLCR |
| SEQ ID NO: 1275 | GSMCNIPCFTTDHQMARACDDCCGGKGRGKCYGPQCLCR |
| SEQ ID NO: 1276 | GSMCNIPCFTTDHQMARKCADCCGGKGRGKCYGPQCLCR |
| SEQ ID NO: 1277 | GSMCNIPCFTTDHQMARKCDACCGGKGRGKCYGPQCLCR |
| SEQ ID NO: 1278 | GSMCNIPCFTTDHQMARKCDDCCAGKGRGKCYGPQCLCR |
| SEQ ID NO: 1279 | GSMCNIPCFTTDHQMARKCDDCCGAKGRGKCYGPQCLCR |
| SEQ ID NO: 1280 | GSMCNIPCFTTDHQMARKCDDCCGGAGRGKCYGPQCLCR |
| SEQ ID NO: 1281 | GSMCNIPCFTTDHQMARKCDDCCGGKARGKCYGPQCLCR |
| SEQ ID NO: 1282 | GSMCNIPCFTTDHQMARKCDDCCGGKGAGKCYGPQCLCR |
| SEQ ID NO: 1283 | GSMCNIPCFTTDHQMARKCDDCCGGKGRGACYGPQCLCR |
| SEQ ID NO: 1284 | GSMCNIPCFTTDHQMARKCDDCCGGKGRGKCAGPQCLCR |
| SEQ ID NO: 1285 | GSMCNIPCFTTDHQMARKCDDCCGGKGRGKCYAPQCLCR |
| SEQ ID NO: 1286 | GSMCNIPCFTTDHQMARKCDDCCGGKGRGKCYGAQCLCR |
| SEQ ID NO: 1287 | GSMCNIPCFTTDHQMARKCDDCCGGKGRGKCYGPACLCR |
| SEQ ID NO: 1288 | GSMCNIPCFTTDHQMARKCDDCCGGKGRGKCYGPQCACR |
| SEQ ID NO: 1289 | GSMCNIPCFTTDHQMARKCDDCCGGKGRGKCYGPQCLCA |
| SEQ ID NO: 1290 | MCNIPCFTTDHQMARKCDDCCGGKGRGKCYGPQCLCR |
| SEQ ID NO: 1291 | ACMPCFTTDHQMARKCDDCCGGKGRGKCYGPQCLCR |
| SEQ ID NO: 1292 | MCAPCFTTDHQMARKCDDCCGGKGRGKCYGPQCLCR |
| SEQ ID NO: 1293 | MCMACFTTDHQMARKCDDCCGGKGRGKCYGPQCLCR |
| SEQ ID NO: 1294 | MCMPCATTDHQMARKCDDCCGGKGRGKCYGPQCLCR |
| SEQ ID NO: 1295 | MCMPCFATDHQMARKCDDCCGGKGRGKCYGPQCLCR |
| SEQ ID NO: 1296 | MCMPCFTADHQMARKCDDCCGGKGRGKCYGPQCLCR |
| SEQ ID NO: 1297 | MCMPCFTTAHQMARKCDDCCGGKGRGKCYGPQCLCR |
| SEQ ID NO: 1298 | MCMPCFTTDAQMARKCDDCCGGKGRGKCYGPQCLCR |
| SEQ ID NO: 1299 | MCMPCFTTDHAMARKCDDCCGGKGRGKCYGPQCLCR |
| SEQ ID NO: 1300 | MCMPCFTTDHQAARKCDDCCGGKGRGKCYGPQCLCR |
| SEQ ID NO: 1301 | MCMPCFTTDHQMAAKCDDCCGGKGRGKCYGPQCLCR |
| SEQ ID NO: 1302 | MCMPCFTTDHQMARACDDCCGGKGRGKCYGPQCLCR |
| SEQ ID NO: 1303 | MCMPCFTTDHQMARKCADCCGGKGRGKCYGPQCLCR |
| SEQ ID NO: 1304 | MCMPCFTTDHQMARKCDACCGGKGRGKCYGPQCLCR |
| SEQ ID NO: 1305 | MCMPCFTTDHQMARKCDDCCAGKGRGKCYGPQCLCR |
| SEQ ID NO: 1306 | MCMPCFTTDHQMARKCDDCCGAKGRGKCYGPQCLCR |
| SEQ ID NO: 1307 | MCMPCFTTDHQMARKCDDCCGGAGRGKCYGPQCLCR |
| SEQ ID NO: 1308 | MCMPCFTTDHQMARKCDDCCGGKARGKCYGPQCLCR |
| SEQ ID NO: 1309 | MCMPCFTTDHQMARKCDDCCGGKGAGKCYGPQCLCR |
| SEQ ID NO: 1310 | MCMPCFTTDHQMARKCDDCCGGKGRGACYGPQCLCR |
| SEQ ID NO: 1311 | MCMPCFTTDHQMARKCDDCCGGKGRGKCAGPQCLCR |
| SEQ ID NO: 1312 | MCMPCFTTDHQMARKCDDCCGGKGRGKCYAPQCLCR |
| SEQ ID NO: 1313 | MCMPCFTTDHQMARKCDDCCGGKGRGKCYGAQCLCR |
| SEQ ID NO: 1314 | MCMPCFTTDHQMARKCDDCCGGKGRGKCYGPACLCR |
| SEQ ID NO: 1315 | MCMPCFTTDHQMARKCDDCCGGKGRGKCYGPQCACR |
| SEQ ID NO: 1316 | MCMPCFTTDHQMARKCDDCCGGKGRGKCYGPQCLCA |

[0184] In some embodiments, a peptide of the present disclosure in a peptide-I/O complex disclosed herein can be a peptide comprising at least 70%, at least 75%, at least 80%, at least 82%, at least 84%, at least 86%, at least 88%, at least 90%, at least 91%, at least 92%, at least 93%, at least 94%, at least 95%, at least 96%, at least 97%, at least 98%, at least 99%, or at least 100% sequence identity to SEQ ID NO: 1, or a variant, homolog, or fragment thereof. In some embodiments, a peptide of the present disclosure in a peptide-I/O complex disclosed herein can be a peptide comprising at least 70%, at least 75%, at least 80%, at least 82%, at least 84%, at least 86%, at least 88%, at least 90%, at least 91%, at least 92%, at least 93%, at least 94%, at least 95%, at least 96%, at least 97%, at least 98%, at least 99%, or at least 100% sequence identity to SEQ ID NO: 2, or a variant, homolog, or fragment thereof. In some embodiments, a peptide of the present disclosure in a peptide-I/O complex disclosed herein can be a peptide comprising at least 70%, at least 75%, at least 80%, at least 82%, at least 84%, at least 86%, at least 88%, at least 90%, at least 91%, at least 92%, at least 93%, at least 94%, at least 95%, at least 96%, at least 97%, at least 98%, at least 99%, or at least 100% sequence identity to SEQ ID NO: 568, or a variant, homolog, or fragment thereof. In some embodiments, a peptide of the present disclosure in a peptide-I/O complex disclosed herein can be a peptide comprising at least 70%, at least 75%, at least 80%, at least 82%, at least 84%, at least 86%, at least 88%, at least 90%, at least 91%, at least 92%, at least 93%, at least 94%, at least 95%, at least 96%, at least 97%, at least 98%, at least 99%, or at least 100% sequence identity to SEQ ID NO: 569, or a variant, homolog, or fragment thereof. In some embodiments, a peptide of the present disclosure in a peptide-I/O complex disclosed herein can be a peptide comprising at least 70%, at least 75%, at least 80%, at least 82%, at least 84%, at least 86%, at least 88%, at least 90%, at least 91%, at least 92%, at least 93%, at least 94%, at least 95%, at least 96%, at least 97%, at least 98%, at least 99%, or at least 100% sequence identity to SEQ ID NO: 570, or a variant, homolog, or fragment thereof.

[0185] In some embodiments, a chlorotoxin (CTX) peptide and some of its variants can bind to many different types of human tumors (Dardevet et al., Toxins (Basel) 7:1079-1101 (2015); Ojeda et al., Biopolymers 106:25-36 (2016); Stroud et al., Current Pharmaceutical Design 17:4362-4371 (2011)). Chlorotoxin which has optionally been fluorescently labeled or radiolabeled, can exhibit tumor-selective uptake in mouse models of brain cancer, prostate cancer, sarcoma, and colon cancer Veiseh et al., Cancer Res 67:6882-6888 (2007); Kovar et al., Anal Biochem 440:212-219 (2013). Tozuleristide, a fluorescently labeled variant of CTX, exhibits tumor-selective uptake in multiple tumor types in rodent models (Butte et al., Neurosurgical Focus 36:E1 (2014); Baik et al., JAMA Otolaryngol Head Neck Surg 142:330-338 (2016)), and in dogs with spontaneous tumors (Fidel et al., Cancer Res 75:4283-4291 (2015)). A radiolabeled chlorotoxin was tested in Phase 1 and 2 clinical trials. The radiolabeled chlorotoxin can selectively bind to solid tumors, including colon cancer, prostate cancer, non-small cell lung cancer, metastatic melanoma, pancreatic cancer, and glioma (Hockaday et al., J Nucl Med 46:580-586 (2005); Mamelak et al., J Clin Oncol 24:3644-3650 (2006); Gribbin et al., J Clin Oncol 27:abstr e14507 (2009); O'Neill and Jacoby, U.S. patent application Ser. No. 20/100,215575 (2010)). In some embodiments, a peptide of this disclosure exhibits a high tumor-to-background signal after administration to a subject, wherein the subject is a human or a non-human animal. Minimal binding to normal tissue as compared to tumor tissue, has shown the ability of chlorotoxin peptide and some of its variants to be capable of tumor homing. In some embodiments, any peptide of this disclosure can bind to solid tumors including, but not limited to, colon cancer, prostate cancer, non-small cell lung cancer, melanoma, breast cancer, and glioma with minimal off-target binding to normal tissue.

[0186] Chlorotoxin variants with either alanine or arginine substitutions at positions 15 and 23 (K15A K23A, or K15R K23R) retain their tumor binding properties, and a cyclized version retains tumor binding properties and has a longer serum half-life compared with the linear peptides (Akcan et al, J Med Chem 54:782-787 (2011)). Ala scans (replacing one or more residues with Ala throughout the peptide sequence) can identify important regions of the peptide for function, such as by creating the variant peptides and testing them for function such as tumor accumulation, blood brain barrier penetration, correct folding, and I/O pathway engagement. One or more amino acid residues within peptides of this disclosure, such as SEQ ID NO: 568, can be replaced with Ala. The observed long retention time of both radiolabeled (Hockaday et al., J Nucl Med 46:580-586 (2005)) and fluorescence tagged (Veiseh et al., Cancer Res 67:6882-6888 (2007)) chlorotoxin suggests a mechanism other than simple cell-surface binding kinetics. Chlorotoxin peptides and some of its variants have been shown to be internalized by cancer cells (Ojeda et al., Biopolymers 108 (2017)) by an active process that is enhanced by lysine to arginine substitutions at positions 15 and 23 (Ojeda et al., Biopolymers 108 (2017); Wiranowska et al., Cancer Cell Intl 11:1-13 (2011)). Chlorotoxin can associate with cell-surface Annexin A2 (ANXA2) (Kesavan et al., J Biol Chem 285:4366-4374 (2010)), which with S100A10 forms a 94 kDa heterotetramer called Calpactin I or Allt (MacLeod et al., J Biol Chem 278:25577-25584 (2003)). Annexin A2 is known to be capable of associating with lipid rafts, and can be internalized and targeted for recycling rather than degradation (Valapala and Vishwanatha, J Biol Chem 286:30911-30925 (2011)). Chlorotoxin can also interact with and reduce cell surface expression of MMP-2 (Deshane et al., J Biol Chem 278:4135-4144 (2003)). Internalization of labeled chlorotoxin can be verified by the punctate signal inside cultured cells following exposure to chlorotoxin: Cy5.5 (Veiseh et al., Cancer Res 67:6882-6888 (2007)). Further work showed that chlorotoxin can be internalized in cancer cells via clathrin-mediated endocytosis, and that it can further localize to the perinuclear Golgi region (Wiranowska et al., Cancer Cell International 11:27 (2011)). Chlorotoxin can be conjugated to cytotoxic drugs, such as onconase, and can improve the anti-tumor effect of the cytotoxic drug by increasing cellular uptake (Wang and Guo, Oncol Lett 9:1337-1342 (2015)). In some embodiments, any peptide of the present disclosure can be internalized by binding to cell surface targets, by an active process that is enhanced upon lysine to arginine mutations at any residue in the peptide, by pinocytosis, can associate with Annexin A2, can associate with calpactin, can associate with lipid rafts, can interact with MMP-2 via caveolin-mediated internalization, or can be internalized via clathrin-mediated endocytosis.

[0187] In vivo studies also demonstrate the ability of pacifastin peptides, also known as LCMI-II peptides, THP1 peptides, and chymotrypsin inhibitors, to accumulate in and penetrate the cells of tumors (Sottero et al., Anticancer Research 38:51-60 (2018)), such as the peptides of SEQ ID No: 1243-SEQ ID NO: 1262. These peptides, such as those set forth in SEQ ID NO: 1243-SEQ ID NO: 1262, can interact with proteases, such as the serine proteases chymotrypsin and elastase. It is possible that proteases are upregulated and present at higher levels in the tumor microenvironment, such as cancer-associated serine proteases such as type II transmembrane serine proteases matriptase, hepsin, TMPRSS2, and TMPRSS4, and binding or interacting with them causes the preferential accumulation of pacifastin peptides in tumor and tumor cells. These peptides, such as those set forth in SEQ ID NO: 1243-SEQ ID NO: 1262, can be highly tolerant to mutations. By complexing an I/O agent with a pacifastin peptide, or variant thereof, such as those set forth in SEQ ID NO: 1243-SEQ ID NO: 1262, the I/O agent can be delivered preferentially to tumors, accumulate in tumors, or be delivered into subcellular compartments or the cytoplasm of tumor cells or the tumor microenvironment. Moreover, I/O delivery can be achieved using the peptide-I/O complexes of the present invention to cancers and tumors where cancer-associated proteases, such as serine proteases, chymotrypsin and elastase serine proteases, type II transmembrane serine proteases, matriptase, hepsin, TMPRSS2, TMPRSS4, and the like, are upregulated or present.

[0188] Any one of the peptides disclosed herein, for example any of SEQ ID NO: 1-SEQ ID NO: 1134, SEQ ID NO: 1243-SEQ ID NO: 1262, or SEQ ID NO: 1263-SEQ ID NO: 1316, can have cell penetrating properties, BBB crossing properties, tumor homing properties, or a combination thereof. In any of SEQ ID NO: 1-SEQ ID NO: 1134, SEQ ID NO: 1243-SEQ ID NO: 1262, or SEQ ID NO: 1263-SEQ ID NO: 1316 or fragment thereof, any one or more K residues can be replaced by an R residue or any one or more R residues can be replaced by a K residue. In any of SEQ ID NO: 1-SEQ ID NO: 1134, SEQ ID NO: 1243-SEQ ID NO: 1262, or SEQ ID NO: 1263-SEQ ID NO: 1316 or any fragment thereof, any one or more M residues can be replaced by any one of I, L, or V residues, any one or more L residues can be replaced by any one of V, I, or M residues, any one or more I residues can be replaced by any one of M, L, or V residues, or any one or more V residues can be replaced by any one of I, L, or M residues. In any embodiment, at least one of the amino acids alone or in combination can be interchanged in the peptides or peptide fragments as follows: K/R, M/I/L/V, G/A, S/T, Q/N, and D/E wherein each letter is each individually any amino acid or amino acid analogue. In some instances, the peptide can contain only one lysine residue, or no lysine residue. In any of SEQ ID NO: 1-SEQ ID NO: 1134, SEQ ID NO: 1243-SEQ ID NO: 1262, or SEQ ID NO: 1263-SEQ ID NO: 1316 or fragment thereof, any amino acid can be replaced with citrulline (Cit). In some cases, a peptide can include the first two N-terminal amino acids GS, as with peptides of SEQ ID NO: 1-SEQ ID NO: 567, SEQ ID NO: 1243-SEQ ID NO: 1252, or SEQ ID NO: 1263-SEQ ID NO: 1289, or such N-terminal amino acids (GS) can be substituted by any other one or two amino acids. In other cases, a peptide does not include the first two N-terminal amino acids GS, as with peptides of SEQ ID NO: 568-SEQ ID NO: 1134, SEQ ID NO: 1253-SEQ ID NO: 1262, or SEQ ID NO: 1290-SEQ ID NO: 1316. In some cases, the N-terminus of the peptide can be blocked, such as by an acetyl group; in other instances the C-terminus of the peptide can be blocked, such as by an amide group.

[0189] In some instances, the peptide is any one of SEQ ID NO: 1-SEQ ID NO: 1134, SEQ ID NO: 1243-SEQ ID NO: 1262, or SEQ ID NO: 1263-SEQ ID NO: 1316 or a functional fragment thereof, in which the functional fragment thereof can home, target, be directed to, migrate to, be retained by, accumulate in, or bind to specific regions, tissues, structures, or cells of tumors like the peptide of which it is a functional fragment. In other embodiments, a peptide of the disclosure further comprises a peptide with 99%, 98%, 97%, 96,%, 95%, 90%, 85%, or 80% homology to any one of SEQ ID NO: 1-SEQ ID NO: 1134, SEQ ID NO: 1243-SEQ ID NO: 1262, or SEQ ID NO: 1263-SEQ ID NO: 1316. In further embodiments, the functional fragment thereof can comprise a contiguous fragment of any one of SEQ ID NO: 1-SEQ ID NO: 1134, SEQ ID NO: 1243-SEQ ID NO: 1262, or SEQ ID NO: 1263-SEQ ID NO: 1316 that is at least 17, at least 18, at least 19, at least 20, at least 21, at least 22, at least 23, at least 24, at least 25, at least 26, at least 27, at least 28, at least 29, at least 30, at least 31, at least 32, at least 33, at least 34, at least 35, at least 36, at least 37, at least 38, at least 39, at least 40, at least 41, at least 42, at least 43, at least 44, at least 45, at least 46 residues long, wherein the functional fragment thereof can be selected from any portion of the peptide. In some embodiments, the functional fragment thereof can contact the cell to which it homes and can exhibit properties of those described herein for peptide and peptide-I/O complexes. In some embodiments, any peptide of the present disclosure can be additionally conjugated or fused to a cell pepentrating peptides (CPP) of TABLE 2, any CPPs disclosed herein, or any other moieties having CPP properties.

[0190] In some cases, an engineering of one or more mutations within a peptide can yield a peptide with an altered isoelectric point, charge, surface charge, or rheology at physiological pH. Such engineering of a mutation to a peptide derived from a scorpion or spider can change the net charge of the complex, for example, by decreasing the net charge by 1, 2, 3, 4, or 5, or by increasing the net charge by 1, 2, 3, 4, or 5. In such cases, the engineered mutation can facilitate the ability of the peptide to contact the tumor. Suitable amino acid modifications for improving the rheology and potency of a peptide can include conservative or non-conservative mutations. A peptide can comprise at most 1 amino acid mutation, at most 2 amino acid mutations, at most 3 amino acid mutations, at most 4 amino acid mutations, at most 5 amino acid mutations, at most 6 amino acid mutations, at most 7 amino acid mutations, at most 8 amino acid mutations, at most 9 amino acid mutations, at most 10 amino acid mutations, or another suitable number as compared to the sequence of the venom component peptide or toxin that the peptide is derived from. In other cases, a peptide, or a functional fragment thereof, can comprise at least 1 amino acid mutation, at least 2 amino acid mutations, at least 3 amino acid mutations, at least 4 amino acid mutations, at least 5 amino acid mutations, at least 6 amino acid mutations, at least 7 amino acid mutations, at least 8 amino acid mutations, at least 9 amino acid mutations, at least 10 amino acid mutations, or another suitable number as compared to the sequence of the venom component peptide or toxin that the peptide is derived from. In some embodiments, a mutation can be engineered within a peptide to provide a peptide that has a desired charge or stability at physiological pH.

[0191] The NMR solution structures, x-ray crystallography, or crystal structures of related structural homologs can be used to inform mutational strategies that can improve the folding, stability, and manufacturability of the peptide, while maintaining the ability of a peptide to home to tumor. They can be used to predict the 3D pharmacophore of a group of structurally homologous scaffolds, as well as to predict possible graft regions of related proteins to create chimeras with improved properties. For example, this strategy can be used to identify critical amino acid positions and loops that can be used to design drugs with improved properties or to correct deleterious mutations that complicate folding and manufacturability for the peptides. These key amino acid positions and loops can be retained while other residues in the peptide sequences can be mutated to improve, change, remove, or otherwise modify function, homing, and activity of the peptide.

[0192] Additionally, the comparison of the primary sequences and the tertiary sequences of two or more peptides can be used to reveal sequence and 3D folding patterns that can be leveraged to improve the peptides and parse out the biological activity of these peptides. For example, comparing two different peptide scaffolds (e.g., a peptide of any one of SEQ ID NO: 1-SEQ ID NO: 1134, SEQ ID NO: 1243-SEQ ID NO: 1262, or SEQ ID NO: 1263-SEQ ID NO: 1316) that home to tumor can lead to the identification of conserved pharmacophores that can guide engineering strategies, such as designing variants with improved folding properties. Important pharmacophore, for example, can comprise aromatic residues or basic residues, which can be important for binding. Any of the peptides of the present invention (e.g., a peptide of any one of SEQ ID NO: 1-SEQ ID NO: 1134, SEQ ID NO: 1243-SEQ ID NO: 1262, or SEQ ID NO: 1263-SEQ ID NO: 1316) can be used as a peptide scaffold.

[0193] Improved peptides can also be engineered based upon immunogenicityinformation, such as immunogenicity information predicted by TEPITOPE and TEPITOPEpan or other in silico immunogenicity prediction methods. TEPITOPE is a computational approach which uses position specific scoring matrix to provide prediction rules for whether a peptide will bind to 51 different HLA-DR alleles, and TEPITOPEpan is method that uses TEPITOPE to extrapolate from HLA-DR molecules with known binding specificities to HLA-DR molecules with unknown binding specificities based on pocket similarity. For example, TEPITOPE and TEPITOPEpan can be used to determine immunogenicity of peptides that have cell penetrating properties, BBB crossing properties, homing to tumors properties, or a combination thereof. Comparison of peptides with high immunogenicity to peptides with low immunogenicity can guide engineering strategies for designing variants with decreased immunogenicity or for identifying within a group of peptides of similar cell penetrating, tumor homing activity, BBB crossing activity, or a combination thereof, which peptides induce the least immunogenicity.

[0194] The present disclosure can also encompass multimers of the various peptides described herein. Examples of multimers include dimers, trimers, tetramers, pentamers, hexamers, heptamers, and so on. A multimer can be a homomer formed from a plurality of identical subunits or a heteromer formed from a plurality of different subunits. In some embodiments, a peptide of the present disclosure is arranged in a multimeric structure with at least one other peptide, or two, three, four, five, six, seven, eight, nine, ten, or more other peptides. In certain embodiments, the peptides of a multimeric structure each can have the same sequence. In alternative embodiments, some or all of the peptides of a multimeric structure can have different sequences. In further embodiments, the multimeric structure can comprise a dimer, trimer, tetramer, pentamer, hexamer, or heptamer. A multimer can optionally be formed by creating a fusion of the peptide sequences with linkers in between each peptide within the multimer, for example with linkers comprising SEQ ID NO: 1163-SEQ ID NO: 1172, or by conjugating each peptide within the multimer to a substrate such as a polymer or a dendrimer, or any combination thereof.

[0195] The present disclosure can further include a peptide of any one of SEQ ID NO: 1-SEQ ID NO: 1134, SEQ ID NO: 1243-SEQ ID NO: 1262, or SEQ ID NO: 1263-SEQ ID NO: 1316 that can be used as a peptide scaffold that, e.g., can be used as a starting point for generating additional peptides. In some embodiments, a scaffold can be derived from a variety of cysteine-dense peptides such as knottins or hitchins. Some suitable peptides for a scaffold can include, but are not limited to, chlorotoxin, brazzein, circulin, stecrisp, hanatoxin, midkine, hefutoxin, potato carboxypeptidase inhibitor, bubble protein, attractin, a-GI, a-GID, H-PIIIA, @-MVIIA, @-CVID, x-MrIA, p-TIA, conantokin G, contulakin G, GsMTx4, margatoxin, shK, toxin K, chymotrypsin inhibitor (CTI), and EGF epiregulin core.

[0196] Moreover, any one of SEQ ID NO: 1-SEQ ID NO: 1134, SEQ ID NO: 1243-SEQ ID NO: 1262, or SEQ ID NO: 1263-SEQ ID NO: 1316 can likewise be used as a starting point or scaffold for generating additional peptides. In some embodiments, a peptide sequence of the disclosure is flanked by additional amino acids. One or more additional amino acids can, for example, confer a desired in vivo charge, isoelectric point, chemical conjugation site, stability, label, or physiologic property to a peptide.

[0197] Identifying sequence homology can be important for determining key residues that preserve tumor homing function.

[0198] Two or more peptides can share a degree of homology and share similar properties in vivo. For instance, a peptide can share a degree of homology with a peptide of the present disclosure. In some cases, a peptide of the disclosure can have up to about 20% pairwise homology, up to about 25% pairwise homology, up to about 30% pairwise homology, up to about 35% pairwise homology, up to about 40% pairwise homology, up to about 45% pairwise homology, up to about 50% pairwise homology, up to about 55% pairwise homology, up to about 60% pairwise homology, up to about 65% pairwise homology, up to about 70% pairwise homology, up to about 75% pairwise homology, up to about 80% pairwise homology, up to about 85% pairwise homology, up to about 90% pairwise homology, up to about 95% pairwise homology, up to about 96% pairwise homology, up to about 97% pairwise homology, up to about 98% pairwise homology, up to about 99% pairwise homology, up to about 99.5% pairwise homology, or up to about 99.9% pairwise homology with a second peptide. In some cases, a peptide of the disclosure can have at least about 20% pairwise homology, at least about 25% pairwise homology, at least about 30% pairwise homology, at least about 35% pairwise homology, at least about 40% pairwise homology, at least about 45% pairwise homology, at least about 50% pairwise homology, at least about 55% pairwise homology, at least about 60% pairwise homology, at least about 65% pairwise homology, at least about 70% pairwise homology, at least about 75% pairwise homology, at least about 80% pairwise homology, at least about 85% pairwise homology, at least about 90% pairwise homology, at least about 95% pairwise homology, at least about 96% pairwise homology, at least about 97% pairwise homology, at least about 98% pairwise homology, at least about 99% pairwise homology, at least about 99.5% pairwise homology, at least about 99.9% pairwise homology with a second peptide. Various methods and software programs can be used to determine the homology between two or more peptides, such as NCBI BLAST, Clustal W, MAFFT, Clustal Omega, AlignMe, Praline, or another suitable method or algorithm.

[0199] In still other instances, the variant nucleic acid molecules that can code for a peptide of any one of SEQ ID NO: 1-SEQ ID NO: 1134, SEQ ID NO: 1243-SEQ ID NO: 1262, or SEQ ID NO: 1263-SEQ ID NO: 1316 can be identified by either a determination of the sequence identity or homology of the encoded peptide amino acid sequence with the amino acid sequence of any one of SEQ ID NO: 1-SEQ ID NO: 1134, SEQ ID NO: 1243-SEQ ID NO: 1262, or SEQ ID NO: 1263-SEQ ID NO: 1316, or by a nucleic acid hybridization assay. Such peptide variants can include those encoded by nucleic acid molecules (1) that remain hybridized with a nucleic acid molecule having the nucleotide sequence encoding a peptide of any one of SEQ ID NO: 1-SEQ ID NO: 1134, SEQ ID NO: 1243-SEQ ID NO: 1262, or SEQ ID NO: 1263-SEQ ID NO: 1316 (or any complement of the previous sequences) under stringent washing conditions, in which the wash stringency is equivalent to 0.5x-2×SSC with 0.1% SDS at 55-65° C., and (2) that encode a peptide having at least 70%, at least 80%, at least 90%, at least 95%, at least 96%, at least 97%, at least 98%, at least 99% or grater sequence identity or homology, or greater than 95% sequence identity or homology to the amino acid sequence of any one SEQ ID NO: 1-SEQ ID NO: 1134, SEQ ID NO: 1243-SEQ ID NO: 1262, or SEQ ID NO: 1263-SEQ ID NO: 1316. Alternatively, peptide variants of any one SEQ ID NO: 1-SEQ ID NO: 1134, SEQ ID NO: 1243-SEQ ID NO: 1262, or SEQ ID NO: 1263-SEQ ID NO: 1316 can be characterized as those encoded by nucleic acid molecules (1) that remain hybridized with a nucleic acid molecule having the nucleotide sequence of any one SEQ ID NO: 1-SEQ ID NO: 1134, SEQ ID NO: 1243-SEQ ID NO: 1262, or SEQ ID NO: 1263-SEQ ID NO: 1316 (or any complement of the previous sequences) under highly stringent washing conditions, in which the wash stringency is equivalent to 0.1x-0.2×SSC with 0.1% SDS at 50-65° C., and (2) that encode a peptide having at least 70%, at least 80%, at least 90%, at least 95%, at least 96%, at least 97%, at least 98%, at least 99% or grater sequence identity or homology, or greater than 95% sequence identity or homology to the amino acid sequence of any one of SEQ ID NO: 1-SEQ ID NO: 1134, SEQ ID NO: 1243-SEQ ID NO: 1262, or SEQ ID NO: 1263-SEQ ID NO: 1316.

[0200] Percent sequence identity or homology can be determined by conventional methods. See, for example, Altschul et al., Bull. Math. Bio. 48:603 (1986), and Henikoff and Henikoff, Proc. Natl. Acad. Sci. USA 89:10915 (1992). Briefly, two amino acid sequences are aligned to optimize the alignment scores using a gap opening penalty of 10, a gap extension penalty of 1, and the “BLOSUM62” scoring matrix of Henikoff and Henikoff (Id.). The sequence identity or homology is then calculated as: ([Total number of identical matches]/[length of the longer sequence plus the number of gaps introduced into the longer sequence in order to align the two sequences])(100).

[0201] Additionally, there are many established algorithms available to align two amino acid sequences. For example, the “FASTA” similarity search algorithm of Pearson and Lipman is a suitable protein alignment method for examining the level of sequence identity or homology shared by an amino acid sequence of a peptide disclosed herein and the amino acid sequence of a peptide variant. The FASTA algorithm is described by Pearson and Lipman, Proc. Nat'l Acad. Sci. USA 85:2444 (1988), and by Pearson, Meth. Enzymol. 183:63 (1990). Briefly, FASTA first characterizes sequence similarity by identifying regions shared by the query sequence (e.g., SEQ ID NO: 1) and a test sequence that has either the highest density of identities (if the ktup variable is 1) or pairs of identities (if ktup=2), without considering conservative amino acid substitutions, insertions, or deletions. The ten regions with the highest density of identities are then rescored by comparing the similarity of all paired amino acids using an amino acid substitution matrix, and the ends of the regions are “trimmed” to include only those residues that contribute to the highest score. If there are several regions with scores greater than the “cutoff” value (calculated by a predetermined formula based upon the length of the sequence and the ktup value), then the trimmed initial regions are examined to determine whether the regions can be joined to form an approximate alignment with gaps. Finally, the highest scoring regions of the two amino acid sequences are aligned using a modification of the Needleman-Wunsch-Sellers algorithm (Needleman and Wunsch, J. Mol. Biol. 48:444 (1970); Sellers, Siam J. Appl. Math. 26:787 (1974)), which allows for amino acid insertions and deletions. Illustrative parameters for FASTA analysis are: ktup=1, gap opening penalty=10, gap extension penalty=1, and substitution matrix=BLOSUM62. These parameters can be introduced into a FASTA program by modifying the scoring matrix file (“SMATRIX”), as explained in Appendix 2 of Pearson, Meth. Enzymol. 183:63 (1990).

[0202] FASTA can also be used to determine the sequence identity or homology of nucleic acid molecules using a ratio as disclosed above. For nucleotide sequence comparisons, the ktup value can range between one to six, preferably from three to six, most preferably three, with other parameters set as described above.

[0203] Some examples of common amino acids that are a “conservative amino acid substitution” are illustrated by a substitution among amino acids within each of the following groups: (1) glycine, alanine, valine, leucine, and isoleucine, (2) phenylalanine, tyrosine, and tryptophan, (3) serine and threonine, (4) aspartate and glutamate, (5) glutamine and asparagine, and (6) lysine, arginine and histidine. The BLOSUM62 table is an amino acid substitution matrix derived from about 2,000 local multiple alignments of protein sequence segments, representing highly conserved regions of more than 500 groups of related proteins (Henikoff and Henikoff, Proc. Nat'l Acad. Sci. USA 89:10915 (1992)). Accordingly, the BLOSUM62 substitution frequencies can be used to define conservative amino acid substitutions that can be introduced into the amino acid sequences of the present invention. Although it is possible to design amino acid substitutions based solely upon chemical properties (as discussed above), the language “conservative amino acid substitution” preferably refers to a substitution represented by a BLOSUM62 value of greater than-1. For example, an amino acid substitution is conservative if the substitution is characterized by a BLOSUM62 value of 0, 1, 2, or 3. According to this system, preferred conservative amino acid substitutions are characterized by a BLOSUM62 value of at least 1 (e.g., 1, 2 or 3), while more preferred conservative amino acid substitutions are characterized by a BLOSUM62 value of at least 2 (e.g., 2 or 3).

[0204] Determination of amino acid residues that are within regions or domains that are critical to maintaining structural integrity can be determined. Within these regions one can determine specific residues that can be more or less tolerant of change and maintain the overall tertiary structure of the molecule. Methods for analyzing sequence structure include, but are not limited to, alignment of multiple sequences with high amino acid or nucleotide identity or homology and computer analysis using available software (e.g., the Insight II.RTM. viewer and homology modeling tools; MSI, San Diego, Calif.), secondary structure propensities, binary patterns, complementary packing and buried polar interactions (Barton, G.J., Current Opin. Struct. Biol. 5:372-6 (1995) and Cordes, M. H. et al., Current Opin. Struct. Biol. 6:3-10 (1996)). In general, when designing modifications to molecules or identifying specific fragments determination of structure can typically be accompanied by evaluating activity of modified molecules.

[0205] Pairwise sequence alignment can be used to identify regions of similarity that can indicate functional, structural and/or evolutionary relationships between two biological sequences (protein or nucleic acid). By contrast, multiple sequence alignment (MSA) is the alignment of three or more biological sequences. From the output of MSA applications, homology can be inferred and the evolutionary relationship between the sequences assessed. One of skill in the art would recognize as used herein, “sequence homology” and “sequence identity” and “percent (%) sequence identity” and “percent (%) sequence homology” have been used interchangeably to mean the sequence relatedness or variation, as appropriate, to a reference polynucleotide or amino acid sequence.

[0206] Likewise, the peptide-I/O complexes can be modified by the same methods described herein for the peptides of this disclosure, as applied to polynucleotides of any polynucleotide length, chemistry, or structure (e.g., natural or non-natural DNA or RNA, single stranded, double stranded, triple stranded or more, primary, secondary or tertiary poluynucleotide structures, or any combination thereof).

[0207] Any peptide or peptide-I/O complex of the present disclosure, such as SEQ ID NO: 1 or any one of SEQ ID NO: 1-SEQ ID NO: 1134, SEQ ID NO: 1243-SEQ ID NO: 1262, or SEQ ID NO: 1263-SEQ ID NO: 1316, can be internalized by tumor cells and, as such, be cell penetrating. Any peptide or peptide-I/O complex of the present disclosure, such as SEQ ID NO: 1 or any one of SEQ ID NO: 1-SEQ ID NO: 1134, SEQ ID NO: 1243-SEQ ID NO: 1262, or SEQ ID NO: 1263-SEQ ID NO: 1316, can be internalized in a clathrin-dependent manner or by another mechanism into the endosomal compartment. Endosomal trafficking pathways and endosomal trafficking pathways that can be accessed by a peptide or a peptide-I/O complex of the present disclosure are discussed in Hu et al. (Transl Neurodegener. 2015 Sep. 30; 4:18) and Juliano et al. (Nucleic Acids Res. 2016 Aug. 19;44(14):6518-48). Following internalization, into early endosomes, different cargoes have different fates; they can be escorted to the lysosome for degradation, recycled to the cell membrane or exterior, such as for FcRn, or selected proteins can be sorted by the retromer complex to the trans-Golgi network for retrieval. The vesicles leading to the lysosome, including the multivesicular bodies and late endosomes, become increasingly acidic, leading to dissociation of receptor-ligand complexes, as they move to the lysosome. Content of enzymes also changes as vesicles move from endosome to lysosomes. The dissociated receptors may be recycled via the retromer complex and Rab7 back to the Golgi (Purushothaman 2018). Early endosomes can recycle proteins to the cell surface directly. A peptide can also be transported to the perinuclear Golgi or trans-Golgi network (TGN) following a pathway known as “retrograde transport.” Endosomal trafficking pathways can result in recycling of proteins to the cell surface or extracellular space, or in entry of peptides or dissociated ligands into the cytosol. Endosomes can also acidify into lysosomes and a peptide can, thus, be degraded by the cell. Acidification in endosomes can create an environment in which an acid labile linker, such as an acid labile linker that connects a peptide and an immuno-oncology (I/O) agent, can be cleaved. The endosomal-lysosomal pathway can involve a gradual decrease in pH and increase in levels of various proteases, which can enable pH sensitive cleavage, protease-mediated cleavage, or cleavage of labile bonds by other mechanisms. Peptides, and peptide-I/O complexes, of the present disclosure can also enter the cytoplasm by other mechanisms, such as caveolae, pinocytosis, direct penetration, energy-dependent or independent mechanisms, by other mechanisms of translocation, or any combination thereof. Moreover, peptide-I/O complexes can be designed to be presented on cell surfaces (via the endosomal, TGN, or lysosomal pathways) to activate physiologic I/O responses at the cell surface or to be secreted back into the tumor microenvironment (for example, with a peptide-I/O complex comprising an IL-15 agent of the present disclosure or a 4-1BB ligand of the present disclosure as the I/O) or internally such as in the cytoplasm (for example, with a peptide-I/O complex comprising RIG-I ligand I/O of the present disclosure or a STING ligand I/O of the present disclosure) as needed. Moreover, peptide-I/O complexes can be designed for intracellular activation and degradation to target I/Os with intracellular sites of action, for example, in cancer therapy. As such, the peptide-I/O complexes of the present disclosure can effectively be targeted to deliver an I/O to a solid or liquid tumor, to a tumor microenvironment, to tumor tissues, cells, cellular compartments, the cytosol, within tumor cells, to certain compartments or locations within a tumor cell, or any combination thereof, in order to deliver I/Os to sites of action including, optionally, via the endosomal, TGN, and/or lysosomal pathways.

[0208] Different I/Os agents can be delivered to different subcellular compartments, which can be due to various cell penetrating properties. Desired targeting can include the subcellular delivery of I/Os include RIG-I or STING ligands to the cytoplasm, IL-15 agents for cell surface presentation or secretion to the extracellular tumor microenvironment, or 4-1BB ligand for cell surface presentation or secretion. These, and other, I/O agents can be delivered to the endosomal network of tumor cells, via a peptide described herein. Once inside the endosome network, the peptide-I/O complex can be directed to its final destination based on the molecular design. In some instances, the peptide-I/O complex, wherein the I/O comprises a RIG-I ligand, can be fully active with the peptide still complexed to the RIG-I ligand and without any processing. These constructs can escape from endosomes to the cytoplasm which can be aided by the presence of a peptide described herein. Optionally the peptide of a peptide-I/O complex described herein can be processed so as to be removed, degraded, or dissociated by enzymes or chemically within the endosomes, lysosome, or after delivery to the cytoplasm. To increase the efficiency of cytoplasmic delivery, modifications may optionally be added to the peptide-I/O complex, such as cell penetrating peptides or modification of the amino acid sequence of the peptide, usage of hydrophobic linkers, or formulations of the peptide-I/O complex. For peptide-IL-15 agent complexes to exert their signaling on the immune system, the IL-15 agent can be presented in the extracellular tumor microenvironment, optionally by being secreted or presented on the cell surface. In addition, IL-15 agents can demonstrate toxicity in systemic circulation. The design of the peptide-I/O complex, wherein the I/O comprises an IL-15 agent (peptide-IL-15 agent complex) may include the placement of the peptide within the peptide-I/O complex at a position to inhibit IL-15 agent activity until processing (such as intracellular in tumor cells or in the tumor microenvironment) occurs resulting in activation of the IL-15 agent activity. As such, the peptide-IL-15 agent complex may serve as an IL-15 agent prodrug. Processing by an enzyme, such as cathepsin B, during endosomal processing, or by extracellular cathepsin or other enzyme present on the cell surface or in the tumor microenvironment, can release the peptide portion of the peptide-IL-15 agent complex and increase the potency of the remaining IL-15 agent construct. As such, reduced exposure to an IL-15 agent potency may be experienced systemically or in other organs whereas a higher potency exposure to the IL-15 agent can be experienced in the tumor microenvironment, thus targeting the efficacy of IL-15 agent to the tumor and reducing toxicity at other sites. Processing by Cathepsin B may be chosen because it is present throughout the endosomal system including early endosomes, enabling processing without requiring that the protein move into an acidic compartment such as the lysosome. (Blum 1991, Lautwein 2004, Guha 2008, Diederich 2012). The properties of a peptide described herein optionally combined with a peptide dissociating protease cleavage site or other cleavage site can determine the subcellular sorting pathway. Cathepsin B is also found at the cell surface or pericellular space in many cancers (Fonovic and Turk, Biochim Biophys Acta 1840:2560-2570 (2014)). Therefore cleavage of the peptide-I/O complex prodrug can take place prior to internalization, or after internalization and secretion. In these cases the peptide-I/O complex targets the prodrug to the tumor, where it undergoes processing in the pericellular space, resulting in therapeutic levels of the I/O (e.g., IL-15 agents) in the tumor microenvironment. Other enzymes present in the endosomal/lysosomal pathway, or present in the tumor microenvironment or pericellular space, may also be targeted for the processing mechanism of a prodrug. These enzymes include, but are not limited to, glucoronidases including beta-glucuronidase, hyaluronidase and matrix metalloproteases (MMP), such as MMP-1, 2, 7, 9, 13, or 14.

[0209] A peptide of this disclosure can also include non-natural, non-common, or modified amino acids, such as any amino acid that is not part of the 20 canonical amino acids. The non-natural amino acid can include a unique functional group for chemical conjugation or to change the biophysical or biochemical properties of the protein, such as binding interactions, stability, or conformation. The non-natural amino acid can be incorporated recombinantly, synthetically, or can be introduced enzymatically. A non-natural amino acid can include, but is not limited to, azidohomoalanine, homopropargylglycine, p-acetyl-phenylalanine, or fluoroalanine, and can include, but is not limited to, an azide, alkyne, ketone, or aldehyde functional group, or any combination thereof. A non-common amino acid can include, but is not limited to, an amino acid precursor or intermediate, citrulline (Cit; often designated as X), selenocysteine (U; Sec) and pyrrolysine (O; Pyl), or any combination thereof.

[0210] A peptide of the present disclosure can more effectively target an immunooncology agent (I/O)) to a tumor microenvironment, to tumor tissues, cells, cellular compartments, the cytosol, within tumor cells or to certain compartments or locations within a tumor cell, and/or across the blood brain barrier (BBB) as compared to I/Os without the peptide. A peptide of the present disclosure can also exhibit higher and more consistent uptake by tumor cells, thereby leading to higher intracellular delivery of complexed I/Os. Moreover, a peptide of the present disclosure can have reduced off-target accumulation. A peptide-I/O) complex of this present disclosure can also have lower potency until it is processed or modified in the tumor cells or tumor microenvironment. As a result of any of these effects, administration of a peptide-I/( )complex of the present disclosure can have reduced toxicity in off-target, normal tissues as compared to free I/Os.

[0211] A peptide of the present disclosure can be linked to the surface of a lipid nanoparticle that can comprise an I/O. The lipid nanoparticle can then be directed to tumor cells, where it can be internalized and deliver the I/O directly to the cytoplasm. Additionally, a peptide-I/O complex of the present disclosure can deliver the I/O more efficiently into the cytoplasm or cellular compartments than the I/O without the peptide, enabling delivery of sufficient levels of the I/O to a tumor to have a therapeutic effect.

[0212] In addition, a peptide or peptide-I/O complex of this disclosure can be modified to further enhance cellular penetration, cytosolic delivery, endosomal uptake, or endosomal escape, and delivery of the I/O to the cytoplasm or to other subcellular compartments. Delivery of the I/O to the cytoplasm may be necessary in order to activate the desired pathway, such as activating the RIG-I pathway. For instance, a peptide that can enhance cell penetration can be fused or conjugated to the peptide or the peptide-I/O complex to enhance cell penetration. Such a cell penetrating peptide can be placed in the linker between the peptide and the I/O agent in the peptide-I/O complex, or on either or both of the I/O agent or on the peptide in the peptide-I/O complex, optionally with linkers in between. One or more than one or optionally 1-10 of such cell penetrating peptides could be added to a peptide-I/O complex. Exemplary cell penetration enhancing peptides can include, but are not limited to, Tat (GRKKRRQRRRPPQ, SEQ ID NO: 1207), oligo-Arg, which is Rx (Rx, where X=6-12 (SEQ ID NO: 1382), or x=3-20 (SEQ ID NO: 1495) or more R (Arg) residues), penetratin (RQIKIWFQNRRMKWKK, SEQ ID NO: 1208), pVEC (LLIILRRRIRKQAHAHSK, SEQ ID NO: 1209), transportan (GWTLNSAGYLLGKINLKALAALAKKIL, SEQ ID NO: 1210), MPG (GALFLGFLGAAGSTMGAWSQPKKKRKV, SEQ ID NO: 1211), Pep-1 (KETWWETWWTEWSQPKKKRKV, SEQ ID NO: 1212), MAP (KLALKLALKALKAALKLA, SEQ ID NO: 1213), and R6W3 (RRWWRRWRR, SEQ ID NO: 1214), Oct4 (DVVRVWFCNRRQKGKR, SEQ ID NO: 1215), WT1-pTj (KDCERRFSRSDQLKRHQRRHTGVKPFQ, SEQ ID NO: 1216), DPV3 (RKKRRRESRKKRRRES, SEQ ID NO: 1217), VP22 (DAATATRGRSAASRPTERPRAPARSASRPRRPVE, SEQ ID NO: 1218), KW (KRKRWHW, SEQ ID NO: 1219), KFGF (AAVLLPVLLAAP, SEQ ID NO: 1220), FGF12 (PIEVCMYREP, SEQ ID NO: 1221), Integrin beta3 peptide (VTVLALGALAGVGVG, SEQ ID NO: 1222), C105Y (PFVYLI, SEQ ID NO: 1223), and TP2 (PLIYLRLLRGQF, SEQ ID NO: 1224), and any other peptides as described in Raucher et al. (Trends Mol Med. 2015 September;21(9):560-70), Ramsey et al. (Pharmacol Ther. 2015 October; 154:78-86), Bechara et al. (FEBS Lett. 2013 Jun. 19;587(12):1693-702). Other exemplary cell penetrating peptides can also include cysteine-dense peptides such as imperatoxin A, maurocalcine, MCoTI-II, EETI-II, kalata B1, SFTI-1, and CyLoP-1.

[0213] A number of cell penetrating peptides (CPPs), can serve as delivery vehicles to facilitate cellular intake/uptake of the peptide-I/O complexes disclosed herein, or translocation of the peptide-I/O complexes across cell membranes, or delivery of the peptide-I/O complex to the cytosol or subcellular compartments. Some CPPs which are 8-30 amino acids long with cationic or amphipathic sequences, have been described that can deliver cargo across the membrane. Such cargo includes peptides, proteins, oliogonucleotides, polynucleotides, and various small molecules. Typically, these CPPs facilitate entry of the CPP-cargo into the endosomal compartment, where they accumulate or are processed. Additional modifications are required, in some cases, to efficiently deliver cargo across the endosomal membrane to the cytoplasm or nucleus. One example is derived from HIV TAT (Sawant 2010, Rizzuti 2015). TAT peptides efficiently enable localization into the endosome but are not very efficient at cytoplasmic delivery. Dimerization of this TAT peptide enhances cytoplasmic penetration (Monreal 2015, Kim 2018, Erazo-Oliveras 2014).

[0214] CPPs, which can be used for delivery of peptide-I/O complexes described herein, including the TAT peptides, such as the arginine-rich sequence TATp 48-60: GRKKRRQRRRPPQ (SEQ ID NO: 1207) and the best known TAT peptide CPP, YGRKKRRQRRR (SEQ ID NO: 1395), and CGYGRKKRRQRRRGC (SEQ ID NO: 1492) (TAT), GVFVLGFLGFLA (fusogenic peptide of HIV bp160 envelope protein; SEQ ID NO: 1384), cationic Arg rich and hydrophobic peptides to enhance endocytosis and endosomal release such as RRRRRRRR: (R8; SEQ ID NO: 1385), DSHAKRHHGYKRKFHEKHHSHRGY (Histatin 5 and derivative peptide; den Hertog 2004; SEQ ID NO: 1386), KRLFKKLLFSLRKY (dhvar4; SEQ ID NO:1387), CIGAVLKVLTTGLPALISWIKRKRQQ (melittin; SEQ ID NO: 1388), CLIKKALAALAKLNIKLLYGASNLTWG (transportan; SEQ ID NO: 1389), YKQSHKKGGKKGSG (NrTP6-C nucleolar targeting peptide; Rodrigues 2011; SEQ ID NO: 1390), (VRLPPP)3 (proline rich peptide derived from maize y-zein; Fernundez-Carneado 2004; SEQ ID NO: 1391), VSRRRRRRGGRRRR (low molecular weight protamine; SEQ ID NO: 1392), EARPALLTSRLRFIPK (GV1001 is a peptide which corresponds to residues 611-626 of the human telomerase reverse transcriptase (hTERT) protein; SEQ ID NO: 1393), KALLAL (Grijalvo 2018; SEQ ID NO: 1394), CPPs as listed in TABLE 2 below (from Peraro 2018) YGRKKRRQRRR (TAT; SEQ ID NO: 1395), RRRRRRRRR (R9; SEQ ID NO: 1396), AGYLLGKINLKALAALAKKIL (TP10; SEQ ID NO: 1397), LSTAADMQGVVTDGMASGLDKDYLKPDD (P28; SEQ ID NO:1398), CSIPPEVKFNKPFVYLI (C105Y; SEQ ID NO: 1399), and SDLWEMMMVSLACQY (Pep-7; SEQ ID NO: 1400).

[0215] Other TAT peptides that are consistent with the present disclosure include GRKKRRQRRRPQ (SEQ ID NO: 1487), GRKKRRQRRRP (SEQ ID NO: 1488), GRKKRRQRRRG (SEQ ID NO: 1489), CGYGRKKRRQRRRGC (SEQ ID NO: 1492), RKKRRQRRR (SEQ ID NO: 1490) and others. Many cell penetrating peptide sequences are listed on CPPsite 2.0 (http://crdd.osdd.net/raghava/cppsite/index.html) and key sequences are listed below.

[0216] CPPs of the present disclosure may also include other cell penetrating compounds as reviewed by Varkouhi (2011), which is incorporated herein in its entirey. CPPs of the present disclosure may also include those mentioned in CPPsite 2.0 database (http://crdd.osdd.net/raghava/cppsite/) described by Agrawal (2016), both of which are incorporated herein in their entirety.

[0217] Any of the above peptides, combined with a peptide-I/O complex of this disclosure, may enhance the delivery of cargo across the membrane, into the cytoplasm. Using CPPs for delivery of the peptide-I/O complexes can be desired for I/O agents with intracellular targets, such as RIG-I, MDA5, and STING.

[0218] A summary of cell penentrating peptides, which can be used in conjunction with the peptide-I/O complexes of the present disclosure are shown below in TABLE 2.

TABLE 2
Additional Cell Penetrating Peptides

| SEQ ID NO | Name | Sequence |
|---|---|---|
| SEQ ID NO: 1382 | | Rₓ, where x = 6-12 or more R residues |
| SEQ ID NO: 1207 | TAT p48-60 | GRKKRRQRRRPPQ |
| SEQ ID NO: 1208 | penetratin | RQIKIWFQNRRMKWKK |
| SEQ ID NO: 1209 | pVEC | LLIILRRRIRKQAHAHSK |
| SEQ ID NO: 1210 | transportan | GWTLNSAGYLLGKINLKALAALAKKIL |
| SEQ ID NO: 1211 | MPG | GALFLGFLGAAGSTMGAWSQPKKKRKV |
| SEQ ID NO: 1212 | Pep-1 | KETWWETWWTEWSQPKKKRKV |
| SEQ ID NO: 1213 | MAP | KLALKLALKALKAALKLA |
| SEQ ID NO: 1214 | R6W3 | RRWWRRWRR |
| SEQ ID NO: 1215 | Oct4 | DVVRVWFCNRRQKGKR |
| SEQ ID NO: 1216 | WT1-pTj | KDCERRFSRSDQLKRHQRRHTGVKPFQ |
| SEQ ID NO: 1217 | DPV3 | RKKRRRESRKKRRRES |
| SEQ ID NO: 1218 | VP22 | DAATATRGRSAASRPTERPRAPARSASRP |
| | | RRPVE |
| SEQ ID NO: 1219 | KW | KRKRWHW |
| SEQ ID NO: 1220 | KFGF | AAVLLPVLLAAP |
| SEQ ID NO: 1221 | FGF12 | PIEVCMYREP |
| SEQ ID NO: 1222 | Integrin beta3 | VTVLALGALAGVGVG |
| | peptide | |
| SEQ ID NO: 1399 | C105Y | CSIPPEVKFNKPFVYLI |
| SEQ ID NO: 1224 | TP2 | PLIYLRLLRGQF |
| SEQ ID NO: 1383 | C-TAT | CAYGRKKRRQRRRG |
| SEQ ID NO: 1384 | fusogenic | GVFVLGFLGFLA |
| | peptide of HIV | |
| | bp160 envelope | |
| | protein | |
| SEQ ID NO: 1385 | R8 | RRRRRRRR |
| SEQ ID NO: 1386 | Histatin 5 and | DSHAKRHHGYKRKFHEKHHSHRGY |
| | derivative | |
| | peptide | |
| SEQ ID NO: 1387 | dhvar4 | KRLFKKLLFSLRKY |
| SEQ ID NO: 1388 | melittin | CIGAVLKVLTTGLPALISWIKRKRQQ |
| SEQ ID NO: 1389 | transportan | CLIKKALAALAKLNIKLLYGASNLTWG |
| SEQ ID NO: 1390 | NrTP6-C | YKQSHKKGGKKGSG |
| | nucleolar | |
| | targeting | |
| | peptide | |
| SEQ ID NO: 1391 | proline rich | (VRLPPP)3 |
| | peptide derived | |
| | from maize | |
| | γ-zein | |
| SEQ ID NO: 1392 | low molecular | VSRRRRRRGGRRRR |
| | weight | |
| | protamine | |
| SEQ ID NO: 1393 | GV1001 is a | EARPALLTSRLRFIPK |
| | peptide which | |
| | corresponds to | |
| | residues 611-626 | |
| SEQ ID NO: 1394 | | KALLAL |
| SEQ ID NO: 1395 | TAT | YGRKKRRQRRR |
| SEQ ID NO: 1396 | R9 | RRRRRRRRR |
| SEQ ID NO: 1397 | TP10 | AGYLLGKINLKALAALAKKIL |
| SEQ ID NO: 1398 | P28 | LSTAADMQGVVTDGMASGLDKDYLKPD |
| | | D |
| SEQ ID NO: 1399 | C105Y | CSIPPEVKFNKPFVYLI |
| SEQ ID NO: 1400 | Pep-7 | SDLWEMMMVSLACQY |
| SEQ ID NO: 1208 | pAntp | RQIKIWFQNRRMKWKK |
| SEQ ID NO: 1442 | 1A | CSSLDEPGRGGFSSESKV |
| SEQ ID NO: 1443 | hLF WT | KCFQWQRNMRKVRGPPVSCIKR |
| SEQ ID NO: 1444 | Xentry | LCLRPVG |
| SEQ ID NO: 1445 | VG-21 | VTPHHVLVDEYTGEWVDSQFK |
| SEQ ID NO: 1446 | NrTP6 | YKQSHKKGGKKGSG |
| SEQ ID NO: 1447 | CyLoP-1 | CRWRWKCCKK |
| SEQ ID NO: 1448 | DPV6 | GRPRESGKKRKRKRLKP |
| SEQ ID NO: 1449 | DPV3/10 | RKKRRRESRRARRSPRHL |
| SEQ ID NO: 1450 | DPV10 | SRRARRSPRHLGSG |
| SEQ ID NO: 1451 | Inv3 | TKRRITPKDVIDVRSVITEINT |
| SEQ ID NO: 1452 | Bac15-24 | PRPLPFPRPG |
| SEQ ID NO: 1453 | ERNS7 | GRQLRIAGRRLRGRSR |
| SEQ ID NO: 1454 | Res3 | KLIKGRTPIKFGKADCDRPPKHSQNGK |
| SEQ ID NO: 1455 | RSV-A6 | KRIPNKKPGKKT |
| SEQ ID NO: 1456 | RSV-A9 | RRIPNRRPRR |
| SEQ ID NO: 1457 | RSV-B2 | KTIPSNKPKKK |
| SEQ ID NO: 1458 | RSG 1.2 | DRRRRGSRPSGAERRRR |
| SEQ ID NO: 1459 | FHV-TA | NRARRNRRRVR |
| | (39-49) | |
| SEQ ID NO: 1460 | Bipartite | KRPAAIKKAGQAKKKK |
| | nucleoplasmin | |
| | NLS | |
| SEQ ID NO: 1461 | ALPHA Virus | KCPSRRPKR |
| | nucelocapsid | |
| SEQ ID NO: 1462 | Herpesvirus 8 | TRRSKRRSHRKF |
| | k8 protein | |
| SEQ ID NO: 1463 | Cyt C 71-101 | GTKMIFVGIKKKEERADLIAYLKKA |
| SEQ ID NO: 1464 | P22 N | NAKTRRHERRRKLAIERGC |
| SEQ ID NO: 1465 | LAMBDA N | MDAQTRRRERRAEKQAQWKAANGC |
| SEQ ID NO: 1466 | PHI 21 N | TAKTRYKARRAELIAERRGC |
| SEQ ID NO: 1467 | C Jun | RIKAERKRMRNRIAASKSRKRKLERIAR |
| | | GC |
| SEQ ID NO: 1468 | Yeast GCN 4 | KRARNTEAARRSRARKLQRMKQGC |
| SEQ ID NO: 1469 | CADY | GLWRALWRLLRSLWRLLWRA |
| SEQ ID NO: 1470 | VP22 | DAATATRGRSAASRPTQRPRAPARSASR |
| | | PRRPVE |
| SEQ ID NO: 1471 | F3 | AKVKDEPQRRSARLSAKPAPPKPEPKPK |
| | | KAPAKK |
| SEQ ID NO: 1472 | PreS2 | PLSSIFSRIGDP |
| SEQ ID NO: 1473 | TFIIE BETA | SKKKKTKV |
| SEQ ID NO: 1474 | 6-Oct | GRKRKKRT |
| SEQ ID NO: 1475 | NF-kB | VQRKRQKLMP |
| SEQ ID NO: 1476 | (1-9)-(38-42) | YKQCHKKGGKKGSG |
| | Crot | |
| SEQ ID NO: 1477 | EB-1 | LIRLWSHLIHIWFQNRRLKWKKK |
| SEQ ID NO: 1478 | HIV-1 Rev | TRQARRNRRRRWRERQRGC |
| SEQ ID NO: 1479 | FHV coat | RRRRNRTRRNRRRVRGC |
| SEQ ID NO: 1480 | BMV Gag | KMTRAQRRAAARRNRWTARGC |
| SEQ ID NO: 1481 | HTLV-II Rex | TRRQRTRRARRNRGC |
| SEQ ID NO: 1482 | CPP-PNA | KFFKFFKFFK |
| SEQ ID NO: 1483 | LB₁_1 | RXRRXRILFQYRXRRXR |
| SEQ ID NO: 1484 | LB₁_2 | RXRRXRYQFLIRXRRXR |
| SEQ ID NO: 1485 | LB₁_5 | RXRRXRIKFQYRXRRXR |
| SEQ ID NO: 1486 | LB₁_7 | RXRRXRIWFQYRXRRXR |
| SEQ ID NO: 1401 | dhvar5 | LLLFLLKKRKKRKY |
| SEQ ID NO: 1402 | HPV3 3L2 | SYFILRRRRKRFPY |
| SEQ ID NO: 1403 | HPV1 6L2 | SYYMLRKRRKRLPY |
| SEQ ID NO: 1404 | hpvl 8L2 | LYYFIRKKRKRVPY |
| SEQ ID NO: 1405 | SV5 | FAGVVIGLAALGVATAAQVTAAVALV |
| SEQ ID NO: 1406 | NDV | FIGAIIGSVALGVATAAQITAASALI |
| SEQ ID NO: 1407 | HPIV3 | FFGGVIGTIALGVATSAQIYAAVALV |
| SEQ ID NO: 1408 | Measles | FAGVVLAGAALGVATAAQITAGIALH |
| SEQ ID NO: 1409 | Nipah | LAGVIMAGVAIGIATAAQITAGVALY |
| SEQ ID NO: 1410 | FP1 | SFIEDLLFNKVTLADAGFMKQY |
| SEQ ID NO: 1411 | FP2 | KQYGECLGDINARDLICAQKF |
| SEQ ID NO: 1412 | Inf HA2 | GLFGAIAGFIENGWEGMIDGWYG |
| SEQ ID NO: 1413 | diINF-7 | GLFEAIEGFIENGWEGMIDGWYGC |
| SEQ ID NO: 1414 | peptide | GLFEAIEGFIENGWEGMIDGWYGC |
| | analogue | |
| | resembling Inf | |
| | HA-2 | |
| | dimerized at the | |
| | COOH | |
| | terminus by | |
| | disulfide bond | |
| | formation | |
| | between | |
| | COOH- | |
| | terminal | |
| | cysteine | |
| | residues | |
| SEQ ID NO: 1415 | Endosomal | GFFG |
| | escape domain | |
| | (EED) | |
| SEQ ID NO: 1416 | Endosomal | GWG |
| | escape domain | |
| | (EED) | |
| SEQ ID NO: 1417 | Endosomal | GFWG |
| | escape domain | |
| | (EED) | |
| SEQ ID NO: 1418 | Endosomal | GFWFG |
| | escape domain | |
| | (EED) | |
| SEQ ID NO: 1419 | Endosomal | GWWG |
| | escape domain | |
| | (EED) | |
| SEQ ID NO: 1420 | Endosomal | GWGGWG |
| | escape domain | |
| | (EED) | |
| SEQ ID NO: 1421 | Endosomal | GWWWG |
| | escape domain | |
| | (EED) | |
| SEQ ID NO: 1422 | synthetic | FFLIPKG |
| | peptide | |
| SEQ ID NO: 1423 | cleavable | GKPILFF |
| | GKPILFF | |
| | sequence from | |
| | Cathepsin D | |
| SEQ ID NO: 1487 | TAT peptide | GRKKRRQRRRPQ |
| SEQ ID NO: 1488 | TAT peptide | GRKKRRQRRRP |
| SEQ ID NO: 1489 | TAT peptide | GRKKRRQRRRG |
| SEQ ID NO: 1490 | TAT peptide | RKKRRQRRR |
| SEQ ID NO: 1505 | Maurocalcine | GDCLPHLKLCKENKDCCSKKCKRRGTNI |
| | | EKRCR |
| SEQ ID NO: 1506\ | Imperatoxin | GDCLPHLKRCKADNDCCGKKCKRRGTN |
| | | AEKRCR |
| SEQ ID NO: 1507 | Hadrucalcin | SEKDCIKHLQRCRENKDCCSKKCSRRGT |
| | | NPEKRCR |
| SEQ ID NO: 1508 | Hemicalcin | TDDEEARWIEKRGDCLPHLKLCKADKDC |
| | | CSKKCKRRGTNPEKRCR |
| SEQ ID NO: 1509 | Opicalcin-1 | GDCLPHLKRCKENNDCCSKKCKRRGTNP |
| | | EKRCR |
| SEQ ID NO: 1510 | Opicalcin-2 | GDCLPHLKRCKENNDCCSKKCKRRGANP |
| | | EKRCR |
| SEQ ID NO: 1511 | Midkine | CGAQTQRIRCRVPCNWKKEFGADCKYKF |
| | (62-104) | ENWGACDGGTGTKVRQ |
| SEQ ID NO: 1512 | MCoTI-II | SGSDGGVCPKILKKCRRDSDCPGACICRG |
| | | NGYCG |

[0219] Viral vectors are an efficient way to deliver nucleic acid molecules to the cytoplasm and nucleus of target cells. The development of new strategies for promoting gene delivery in contrast with the use of viral vectors can use both formulation and covalent approaches. Viral envelope proteins are able to direct the fusion with the endosomal membrane and enable pore formation for insertion of viral nucleic acid. These proteins have key peptide sequences that are responsible for membrane fusion. One is the hydrophobic fusogenic helix peptide at the N terminus of HIV and SIV gp 160 transmembrane envelope protein, a pH-dependent fusion peptide (GVFVLGFLGFLA; SEQ ID NO: 1384) that was found to locally disorganize the lipid layer, a necessary step in the fusion process (Horth 1991). Other enveloped viruses also use pH dependent fusion peptides to penetrate the cytoplasm from the acidified endosomes. These include influenza virus and its fusion peptide of hemagglutinin A, and the F peptide of paramyxovirus F, SARS spike glycoprotein S, papillomavirus minor capsid protein L₂ (Kamper 2006), and Ebola GP2 (Lamb 2007). These viruses use various strategies to transport viral genetic material into the cell, but they all require insertion and disruption of the endosomal membrane. Such membrane disruptive viral peptides, combined with a peptide-I/O complex of this disclosure, can enhance the delivery of cargo across the membrane, into the cytoplasm.

[0220] Using viral proteins for delivery of the peptide-I/O complexes can be desired for delivering I/O agents with intracellular targets, such as RIG-I, MDA5, and STING. Viral proteins for delivery of peptide-I/O complexes can include the L₂ capsid peptides of HPV that show similarity to the histatin 5 peptide that is a human salivary antimicrobial peptide and its derivative peptide, dhvar5, LLLFLLKKRKKRKY (dhvar5; SEQ ID NO: 1401). The HPV L₂ capsid peptides include (Kamper 2006): SYFILRRRRKRFPY (HPV3 3L₂; SEQ ID NO: 1402), SYYMLRKRRKRLPY (HPV1 6L₂; SEQ ID NO: 1403), LYYFIRKKRKRVPY (hpv1 8L₂; SEQ ID NO: 1404).

[0221] Comparison of the amino acid sequences of the fusion peptides from the F proteins of representative members of the family Paramyxoviridae (Russell 2004) reveal viral proteins for delivery of peptide-I/O complexe having the following sequences:

(SV5; SEQ ID NO: 1405)
FAGVVIGLAALGVATAAQVTAAVALV,
(NDV; SEQ ID NO: 1406)
FIGAIIGSVALGVATAAQITAASALI,
(HPIV3; SEQ ID NO: 1407)
FFGGVIGTIALGVATSAQIYAAVALV,
(Measles; SEQ ID NO: 1408)
FAGVVLAGAALGVATAAQITAGIALH,
and
(Nipah; SEQ ID NO: 1409)
LAGVIMAGVAIGIATAAQITAGVALY.

[0222] Viral proteins for delivery of peptide-I/O complexe can include the SARS S protein, which has two fusion peptides, F1 and F2 that act in a concerted manner (Lai 2017) including:

(FPI; SEQ ID NO: 1410)
SFIEDLLFNKVTLADAGFMKQY
and
(FP2; SEQ ID NO: 1411)
KQYGECLGDINARDLICAQKF.

[0223] Viral proteins for delivery of peptide-I/O complex can include Inf HA-2, which is the amino-terminal sequence of Influenza virus X-31 (H3N2) hemagglutinin subunit HA-2. The corresponding dimeric analog peptide diINF-7, of Inf HA-2, dimerized at the COOH terminus by disulfide bond formation between COOH-terminal cysteine residues is also used for delivery of I/O agents to the cell cytoplasm. These peptides have sequences as follows: GLFGAIAGFIENGWEGMIDGWYG (Inf HA2; SEQ ID NO: 1412), GLFEAIEGFIENGWEGMIDGWYGC (diINF-7; SEQ ID NO: 1413) as described (Mastrobattista 2002).

[0224] Any of the above peptides (e.g., any one of SEQ ID NO: 1401-SEQ ID NO: 1414) can optionally be added to a peptide-I/O complex to aid in cytoplasmic delivery to the target.

[0225] The peptides of this disclosure, such as any one of SEQ ID NO: 1-SEQ ID NO: 1134, SEQ ID NO: 1243-SEQ ID NO: 1262, or SEQ ID NO: 1263-SEQ ID NO: 1316, can also be modified to further enhance endosomal membrane fusion and penetration. One relevant example is the modification of a monoclonal antibody (mAb) for cytoplasmic penetration, where observation of the low-efficiency level penetration by the mAb was increased by site specific modification of the mAb with tryptophan, lysine and histidine to improve mAb penetration into the cytoplasm (Kim 2016). A peptide of this disclosure can similarly be modified with Trp, Lys, and His residues at key positions to enhance its release in the early endosome, or to enhance membrane pore formation, or to enhance cytoplasmic penetration.

[0226] Endosomal escape domains (EEDs) can also be used to enhance delivery to the cytoplasm of an I/O agent or a peptide-I/O complex of this disclosure. Endosomal escape domains (EEDs) can consist of short hydrophobic amino acids sequences that are required for viral escape from endosomes. To optimize endosomal escape various EEDs were designed and conjugated to a CPP (e.g., TAT) at a fixed distance of at least six, twelve, and eighteen, polyethylene glycol (PEG) units. Peptides tested containing hydrophobic EEDs included-GFFG (SEQ ID NO: 1415),-GWG (SEQ ID NO: 1416),-GFWG (SEQ ID NO: 1417),-GFWFG (SEQ ID NO: 1418),-GWWG (SEQ ID NO: 1419),-GWGGWG (SEQ ID NO: 1420), and -GWWWG (SEQ ID NO: 1421). For optimal endosomal escape the peptides may contain amino acids with at least one aromatic indole rings and optionally two (e.g., GWWG; SEQ ID NO: 1419) or at least one indole ring and at least one and optionally two aromatic phenyl groups (e.g., GFWFG; SEQ ID NO: 1418) at a distance of at least six PEG units. For example, one group showed endosomal escape of peptides containing amino acids with two aromatic indole rings (GWWG; SEQ ID NO: 1419) or one indole ring and at least two aromatic phenyl groups (GFWFG; SEQ ID NO: 1418) at a fixed distance of six PEG units (Lönn, P. et al. 2016 Sci. Rep. 6, 32301).

[0227] Penetration-accelerating sequences (PAS) such as the synthetic peptide FFLIPKG (SEQ ID NO: 1422) derived from the cleavable GKPILFF (SEQ ID NO: 1423) sequence from Cathepsin D can also be used to enhance cytosolic entry of cationic CPPs (Takayama, K. et al. 2012 Mol. Pharm. 9, 1222-1230) in conjunction with the peptide-I/O complexes of this disclosure.

[0228] Additionally, elements associated with cell penetration can be grafted onto the peptides of this disclosure, such as by adding or modifying amino acids in the loop regions of the peptides of this disclosure to enhance cell penetration. These elements associated with cell penetration can include any of the elements associated with cell penetration of the cell penetrating peptides given above. In addition, non-peptidic molecules, including small molecules, polymers, lipids, etc. that enhance cell penetration can be combined with the peptide-I/O complexes of this disclosure. Also, elements associated with cell penetration, such as those described above or others, can be combined in a formulation and/or by non-covalent combinations, in addition to grafting and fusion approaches.

[0229] Polymers other than peptides such as Synthetic polymers have also been developed to mimic viral fusion peptides that deliver cargo to cytoplasm. (Bulmus 2006, Convertine 2009). Such polymers, such as have been designed to disrupt endosomal membranes and promote the delivery of oligonucleotides (such as RIG-I ligands) to the cytoplasm and nucleus. The gold standard example of such polymers include polyethyleneimine. This and other cationic polymers complex with the nucleic acid cargo and form nanoparticles. However, it may be the free polymer that enables endosomal release (Chen 2018). Many polymers use amide groups as a pH responsive group to facilitate endosomal release. Synthetic polymers have been developed to mimic viral fusion peptides that will lyse red blood cells at acid but not neutral pH (Bulmus 2006, Convertine 2009). Any of the above described polymers can be used as complexes, conjugates, or formulations with a peptide-I/O complexes of this disclosure to enhance cytoplasmic delivery.

[0230] In addition, hydrophobic domains may be added to a peptide-I/O of this disclosure to enhance endosomal escape, endosomal uptake, and/or cytoplasmic delivery. To improve the uptake and delivery of macromolecular complexes to the cytoplasm the inclusion of hydrophobic domains have been added to CPPs to enhance endosomal release. For example, N-terminal stearylation of the CPP TP-10 can promote endosomal escape and delivery of a negatively charged oligonucleotide to the cytoplasm (Mae, M. et al. 2009 J. Control. Release, 143, 221-227.) Addition of hydrophobic domains can also facilitate cellular uptake, membrane permeabilization, endosomal release, and delivery to cytoplasm (de Paula, Bentley, and Mahata. RNA, 13:431-456 (2007). Hydrophobic domains of utility include lipids, fatty acids, cholesterol, lithocholic acid, lauric acid, docosahexaenoic acid, docosanoic acid, (CH2)x where x=1-40. A hydrophobic domain can be in the linker, can be appended to the side of the linker or peptide or I/O agent, or to either end of the molecule. Multiple hydrophobic domains of various lengths can be added to aid in cell penetration, endosomal escape, endosomal uptake, or cytoplasmic delivery. The hydrophobic domain can contain a linear chain, cyclic domains (aromatic or nonaromatic), and optionally one or more double or triple bonds. Similarly, such hydrophobic domains can be used to facilitate cellular uptake, membrane permeabilization, endosomal release, and delivery to cytoplasm of the peptide-I/O complexes of this disclosure.

### Chemical Modifications

[0231] A peptide of the present disclosure can be chemically modified. In some embodiments, the peptide can be mutated to add function, delete function, or modify the in vivo behavior of the peptide. One or more loops between the disulfide linkages can be modified or replaced to include active elements from other peptides (such as described in Moore and Cochran, Methods in Enzymology, 503, p.223-251, 2012). Amino acids can also be mutated, such as to increase half-life or bioavailability, modify, add or delete binding behavior in vivo, add new targeting function, modify surface charge and hydrophobicity, and/or allow conjugation sites. N-methylation is one example of methylation that can occur in a peptide of the disclosure. In some embodiments, the peptide can be modified by methylation on free amines. For example, full methylation can be accomplished through the use of reductive methylation with formaldehyde and sodium cyanoborohydride. The N-terminus of a peptide of the disclosure can be blocked, such as by acetylation or methylation, in order to block reactions with the amine of the N-terminus during conjugation.

[0232] A chemical modification can, for instance, extend the terminal half-life, the absorption half-life, the distribution half-life of a peptide, or change the biodistribution or pharmacokinetic profile of a peptide. A chemical modification can comprise a polymer, a polyether, polyethylene glycol, a biopolymer, a polyamino acid, a fatty acid, a dendrimer, an Fc region, a simple saturated carbon chain such as palmitate or myristolate, sugars, hyaluronic acid, or albumin. The chemical modification of a peptide with an Fc region can be a fusion Fc-peptide. A polyamino acid can include, for example, a polyamino acid sequence with repeated single amino acids (e.g., polyglycine), a polyamino acid sequence with mixed polyamino acid sequences (e.g., gly-ala-gly-ala (SEQ ID NO: 1496)) that may or may not follow a pattern, or any combination of the foregoing.

[0233] In some embodiments, a peptide of the present disclosure can be coupled (e.g., conjugated) to another moiety that, e.g., can modify or effect changes to the properties of the peptide. In certain embodiments, a peptide described herein can be attached to another molecule, such an I/O that provides a therapeutic effect against a cancer. In certain embodiments, a peptide described herein can be attached to an active agent, which can include but is not limited to: a peptide, an oligopeptide, a polypeptide, a polynucleotide, a polyribonucleotide, a DNA, a cDNA, a ssDNA, a RNA, a dsRNA, a hairpin RNA, a micro RNA, an oligonucleotide, an antibody, an antibody fragment, a single chain Fv, an aptamer, a cytokine, an enzyme, a growth factor, a chemokine, a neurotransmitter, a chemical agent, a fluorophore, a metal, a metal chelate, an X-ray contrast agent, a PET agent, a radioisotope, a photosensitizer, a radiosensitizer, a radionuclide chelator, a therapeutic small molecule, a steroid, a corticosteroid, an anti-inflammatory agent, an immune modulator, a protease inhibitor, an amino sugar, a chemotherapeutic, a cytotoxic chemical, a toxin, a tyrosine kinase inhibitor, an anti-infective agent, an antibiotic, an anti-viral agent, an anti-fungal agent, an aminoglycoside, a nonsteroidal anti-inflammatory drug (NSAID) such as ketorolac or ibuprofen, a statin, a nanoparticle, a liposome, a polymer, a biopolymer, a polysaccharide, a proteoglycan, a glycosaminoglycan, a dendrimer, a fatty acid, or an Fc region, or an active fragment or a modification thereof. In some embodiments, the peptide is covalently or non-covalently linked to an I/O or active agent, e.g., directly or via a linker or by formulation such as in a liposome. In some embodiments, the peptide can be expressed as a fusion protein with an I/O, e.g., a cytokine.

[0234] In some embodiments, a peptide of the present disclosure can be modified such that the modification increases the stability and/or the half-life of the peptide. In some embodiments, the attachment of a hydrophobic moiety, such as to the N-terminus, the C-terminus, or an internal amino acid, can be used to extend half-life of a peptide of the present disclosure. In other embodiments, the peptide of the present disclosure can include post-translational modifications (e.g., methylation and/or amidation), which can affect, e.g., serum half-life. In some embodiments, simple carbon chains (e.g., by myristoylation and/or palmitylation) can be conjugated to the peptides. In some embodiments, for example, the simple carbon chains can render a conjugated peptide easily separable from unconjugated material. For example, methods that can be used to separate the desired peptide of the invention from unconjugated material can include, but is not limited to, solvent extraction and reverse phase chromatography. In some embodiments, a lipophilic moiety can be conjugated to the peptide and can extend half-life through reversible binding to serum albumin. Moreover, the conjugated moiety can be a lipophilic moiety that extends the half-life of the peptide through reversible binding to serum albumin. In some embodiments, the lipophilic moiety can be cholesterol or a cholesterol derivative including cholestenes, cholestanes, cholestadienes, and oxysterols. In some embodiments, a peptide can be conjugated to myristic acid (tetradecanoic acid) or a derivative thereof. In other embodiments, a peptide of the present disclosure can be coupled (e.g., conjugated) to a half-life modifying agent. Examples of half-life modifying agents can include but are not limited to: a polymer, a polyethylene glycol (PEG), a hydroxyethyl starch, polyvinyl alcohol, a water soluble polymer, a zwitterionic water soluble polymer, a water soluble poly(amino acid), a water soluble polymer of proline, alanine and serine, a water soluble polymer containing glycine, glutamic acid, and serine, an Fc region, a fatty acid, palmitic acid, antibodies, or a molecule that binds to albumin.

[0235] In some embodiments, the first two N-terminal amino acids (GS) of SEQ ID NO: 1-SEQ ID NO: 567, SEQ ID NO: 1243-SEQ ID NO: 1252, or SEQ ID NO: 1263-SEQ ID NO: 1289 can serve as a spacer or linker in order to facilitate conjugation or fusion to another molecule, as well as to facilitate cleavage of the peptide from such conjugated or fused molecules. In some embodiments, a peptide of the present disclosure can be conjugated to other moieties that, e.g., can modify or effect changes to the properties of the peptide.

### Immuno-oncology Agents (“I/Os”)

[0236] The present disclosure provides immuno-oncology agents, referred to herein as “I/O” or “I/Os,” to be complexed with peptides also disclosed herein for use in cancer therapy. An “I/O” or “I/O agent,” as used herein, is non-limiting and can comprise a single agent, multiple agents, or a complex of agents, with such agents being monomeric, dimer (e.g., homodimeric or heterodimeric), or multimeric (e.g., homomultimeric or heteromultimeric) in structure and with such agents singly, doubly, or multiply complexed, aggregated, modified, fused, linked, or in any combination of the foregoing. In some embodiments, I/Os of the present disclosure can promote anti-tumor host immune responses. For example, I/Os can promote anti-tumor host immune responses within a tumor microenvironment. Strategies that can be employed to achieve a robust immune response to a tumor can include, but are not limited to, induction of cytokine or chemokine secretion, upregulation of co-stimulatory molecules, activation and expansion of T cells (e.g., effector memory T cells), activation and expansion of natural killer (NK) cells, activation and expansion of dendritic cells (DCs) for antigen processing and presentation with suitable co-stimulatory signals, chemokines, and/or growth factors, inhibition of regulatory T cells (Tregs) and myeloid-derived suppressor cells, induction of immunogenic cell death (ICD) in tumor cells, activation of inflammasomes, induction of apoptosis, or a combination thereof. I/Os that can promote anti-tumor immunity via the above described strategies can include interferons (IFNs), cytokines from the interleukin (IL)-2, IL-12 and IL-1families (e.g., IL-2, IL-15, IL-21, IL-12, IL-23, IL-27, IL-1, IL-18, IL-33), checkpoint inhibitors including, but not limited to, inhibitors of CTLA-4, PD-1, PD-L₁, TIM-3, LAG-3, VISTA, TIGIT, B7-H3, B7-H4, B7S1, galectin 9, CD244, BTLA, CD160, CIS, LIGHT, TIGIT; ligands of pattern recognition receptors (PRRs) including, but not limited to, TLR, NLR, ALR, CLR, RLR, RIG-I, MDA5, and STING; molecules that inhibit the macrophage SIRPa-CD47 checkpoint, including but not limited agents that inhibit SIRPa, such as agents that downregulate CD47 expression at the cell surface of cancer cells, soluble SIRPa engineered to be a high-affinity competitive inhibitor, or other antagonists that directly bind to either SIRPa or CD47 and block their interaction and the SIRPa signal; molecules that inhibit the activity of the enzyme indoleamine-2,3-dioxygenase (IDO); molecules that block natural killer (NK) cell checkpoints including, but not limited to, KIR2DL1-3, KIR3DL1, and CD94/NKG2A; and ligands or other agonists or antagonists of TNF family members including, but not limited to, CD40, 4-1BB, OX40, ICOS, CD27, TL-1A, TRAIL, FAS, and GITR. Agonists or antagonists of the BCL2 family may be targeted, including but not limited to BCL2, Mcl-1, BCLXL, BFLa/A1, BCLW, Bax, Bak, Bok, Bad, Bik, Bid, Bim, Noxa, Puma, BMF and HRK. The Bcl-2 regulator FLIP is a possible target. In particular embodiments, the present disclosure provides combination treatment with the peptide-I/O complexes disclosed herein and any combination of PD-1 inhibitors or PD-L₁ inhibitors or checkpoint inhibitors for treatment of cancer. Intracellular proteases may be targeted, including but not limited to caspases, cathepsins, calpains. In some embodiments, an I/O described in Burugu et al. (Semin Cancer Biol. 2017 Oct. 5. pii: S1044-579X(17)30182-70 is incorporated herein by reference. In some embodiments, the I/O can be a cytokine that can promote potent and effective anti-tumor immune responses, such as IL-15 and IL-12. In some embodiments, the I/O can be a PRR ligand, such as a RIG-I ligand, an MDA5 ligand, or a STING ligand. In some embodiments, the I/O can be a ligand of the TNF family, such as natural human 4-1BB ligand, OX40L, or CD40L. Delivery of these I/Os in a peptide-I/O complex can promote anti-tumor immunity, while reducing toxicity as compared to systemically administered free I/Os, thereby promoting an effective therapy for various cancers.

### A. I/Os Comprising IL-15 Agents

[0237] An immuno-oncology agent (I/O) of the present disclosure can comprise an IL-15 agent. An IL-15 agent described herein can include any agent that bind to the IL-15 receptor. For example, IL-15 agents disclosed herein can include interleukin-15 (IL-15) itself, a fragment of IL-15, a variant of IL-15, a mutant of IL-15, such as IL-15N72D, any IL-15 receptor ligand, as well as fusions or complexes of such IL-15 molecules with all or a portion of the IL-15 receptor alpha chain such as IL-15/IL-15Ra fusions or complexes or IL-15/sushi+domain fusions or complexes (e.g., a fusion of IL-15 or IL-15N72D and IL-15Ra or IL-15RαSu). The components of the IL-15 agent may be joined covalently, such as by a recombinant fusion or a chemical conjugate, or noncovalently, such as by a noncovalent high affinity association between IL-15 and all or a portion of the alpha receptor chain. In some embodiments, IL-15 can strongly induce NK cells, effector memory T cells, and y/8 T cells in humans. In some embodiments, IL-15 can induce IFN-γ and granzyme, and can thereby increase cytotoxic activity. IL-15 can additionally inhibit ROR yt CD4+ T cells (Th17), does not stimulate activation-induced cell death (AICD), and can have little or no effect on Tregs (Waldmann, Cancer Immunol Res 3:219-227(2015)). IL-15 production can be regulated by cytokine-inducible SH2-containing (CIS) protein, a suppressor of cytokine signaling (SOCS) protein, and an NK checkpoint, as described by Delconte et al. (Nat Immunol. 2016 July; 17(7):816-24). IL-15 can induce tumor regression and/or inhibit or reduce metastasis and/or prevent or reduce tumor progression and/or increase survival in a subject, such as a human, non-human primate, or any other animal. IL-15 agents include Alt-803 (a novel IL-15 superagonist complex consisting of an IL-15 mutant (IL-15N72D) bound to an IL-15 receptor a/IgG1 Fc fusion protein) from Altor Bioscience (Margolin 2018, Wrangle 2018, Romee 2018), PEGylated forms of IL-15 and IL-2 (designed to not utilize the IL-2Ra chain that provides high affinity for IL-2, as in development by Nektar/BMS (NKTR-214, NCT03138889, NCT02983045) and Armo), ALKS4230 (Alkermes, NCT02799095), and heterodimeric IL-15 (hetIL15 by Admune/Novartis, NCT02452268). These early studies establish safe doses and meaningful pharmacodynamic responses to IL-15 agonist treatment. The potential for cancer therapy, as well as issues challenging IL-15 as such therapy, such as toxicity and short half-life, is reviewed in Robinson and Schluns, Immunol Lett 190:159-168 (2017)). The efficacy and safety of cancer therapy by IL-15 agents can be increased by targeting an IL-15 agents to a tumor, by reducing IL-15 agent activity prior to tumor cell processing, or by trafficking and presentation of the IL-15 agent by tumor cells, such as by the peptide-I/O complexes of this disclosure.

[0238] The immune cell subsets that are influenced by IL-15 agents may have the ability to eradicate tumors. An IL-15 agent can have effects on multiple cell types, including important differences from IL-2. An IL-15 agent can comprise a fusion with the IL-15Rx and this fusion can have a significantly greater potency and a longer in vivo circulation time than a naked IL-15 agent.

[0239] In some embodiments of the peptide-I/O complexes, the peptide-I/O complex is a peptide-IL-15 agent complex (such complex herein also referred to as IL-15 I/O). The IL-15 agent of such peptide-IL-15 agent complexes can comprise an IL-15 or IL-15 fragment. Further the IL-15 agent of such peptide-IL-15 agent complex of can be a fusion of IL-15 with IL-15Rα (IL-15Rα being the alpha receptor chain for IL-15 receptor). Thus the peptide-I/O complex can comprise at least a heterodimeric fusion of IL-15/IL-15Rα, which can bind or interact with the IL-15Rβ/γ receptor to achieve a desired biological effect, such as inducing, activating, or enhancing biological activity on the IL-15Rβ/γ, or reducing, blocking or inhibiting the activity thereon. In some embodiments, the IL-15 agent portion of the peptide-IL-15 agent complex is a fusion comprising at least one IL-15 agent with at least one subunit of its receptor, e.g., IL-15Rα). In other aspects, it is understood that the IL-15 agent is a fusion comprising at least one fragment of an IL-15 with at least one fragment of its receptor subunit, e.g., a fragment of IL-15Rα. Such fragments of the IL-15Rα portion of the IL-15 agent can include, for example, the exon-2 domain of IL-15Rα is also referred to as the sushi domain, or the exon-3 domain comprising a 13 amino acid peptide at its N-terminus, or sushi domain plus the 13 amino acid peptide from exon-3, amongst others described herein. Such complexes and fragments bind or interact with the IL-15Rβ/γ in a manner that induces, activates, or enhances biological activity on the IL-15Rβ/γ, or reduces, blocks or inhibits the activity thereon. In addition either the IL-15 itself or in combination with IL-15Rα in the IL-15 agent can have mutations as described herein. The IL-15Rβ/γ receptor can be expressed on the surface of T cells and NK cells, such as in humans or non-human primates.

[0240] This IL-15Rβ/γ receptor can comprise the common subunits of the IL-2 and IL-15 receptors and can have low to intermediate affinity for the IL-15 agent. The high-affinity receptors for IL-2 and IL-15 agents can also each comprise a third a chain that is cytokine specific and enhances affinity for cytokine binding. In some embodiments, an IL-15 agent can be fused or complexed noncovalently at the cell surface with the full length IL-15Rα. In some embodiments, IL-15 agent is fused or complexed noncovalently with IL-15Rα prior to administration. The combination of an IL-15 agent with an IL-15Rα or portion thereof can act as a superagonist and can demonstrate higher potency than IL-15 alone. In other embodiments, an IL-15 agent can circulate complexed with the soluble form of IL-15Rα after administration. In some embodiments, IL-15RBy can be activated by the IL-15/IL-15Rα fusion, as described by Mortier et al. (J Biol Chem. 2006 Jan. 20;281(3): 1612-9). In some embodiments, the exon-2 domain of IL-15Rα is also referred to as the sushi domain, and can be important for fusion to IL-15 itself, and the exon-3 domain comprising a 13 amino acid peptide at its N-terminus can be important to stabilize the IL-15/IL-15Rα fusion. The sushi domain plus the 13 amino acid peptide from exon-3 can also be referred to as IL-15Rα “sushi+” or “sushi plus,” which is described by Bouchaud et al. (J Mol Biol. 2008 Sep. 26;382(1): 1-12). The sequence of IL-15Rα “IL-15Rα sushi+” is ITCPPPMSVEHADIWVKSYSLYSRERYICNSGFKRKAGTSSLTECVLNKATNVAHWTTPSLK CIRDPALVHQRPAPP (SEQ ID NO: 1176). In some embodiments, the IL-15 agent can be a fusion of IL-15 or IL-15N72D with IL-15Rα sushi+. In some embodiments, the IL-15 fusion with IL-15Rα sushi+can comprise any one of the sequences set forth in SEQ ID NO: 1135-SEQ ID NO: 1138, SEQ ID NO: 1176-SEQ ID NO: 1179, or SEQ ID NO: 1342, and all sequences set forth in TABLE 3.

[0241] In some embodiments, the IL-15 agent of the present invention can be a soluble complex (IL-15N72D:IL-15RαSu/Fc) comprising IL-15 N72D and a dimeric IL-15Rα sushi domain-IgG1 Fc fusion protein, which is an IL-15 N72D mutant complexed through a noncovalent high affinity interaction with IL-15RαSu fused to an Fc domain. In some embodiments, the IL-15 agent can comprise a complex comprising SEQ ID NO: 1179 (ITCPPPMSVEHADIWVKSYSLYSRERYICNSGFKRKAGTSSLTECVINKATNVAHWTT PSLKCIREPKSCDKTHTCPPCPAPELLGGPSVFLFPPKPKDTLMISRTPEVTCVVVDVSHEDP EVKFNWYVDGVEVHNAKTKPREEQYNSTYRVVSVLTVLHQDWLNGKEYKCKVSNKALP APIEKTISKAKGQPREPQVYTLPPSRDELTKNQVSLTCL VKGFYPSDIA VEWESNGQPENNY KTTPPVLDSDGSFFLYSKLTVDKSRWQQGNVFSCSVMHEALHNHYTQKSLSLSPGK, IL-15RαSu fused to an Fc domain, IL-15RαSu/Fc fusion, bolded section depicts IL-15RαSu and non-bolded section shows IgG1 CH2-CH3 (Fc domain)), SEQ ID NO: 1179 (IL-15RαSu fused to an Fc domain), SEQ ID NO: 1178 (NWVNVISDLKKIEDLIQSMHIDATLYTESDVHPSCKVTAMKCFLLELQVISLESGDASIHDT VENLIILANDSLSSNGNVTESGCKECEELEEKNIKEFLQSFVHIVQMFINTS, IL-15 N72D mutant), and SEQ ID NO: 1178 (IL-15 N72D mutant). In other words, two moieties of SEQ ID NO: 1179 are complexed with two moieties of SEQ ID NO: 1178 to form the IL-15 I/O. In some embodiments, the IL-15 agent can comprise a complex comprising SEQ ID NO: 1179 (IL-15RαSu fused to an Fc domain), SEQ ID NO: 1179 (IL-15RαSu fused to an Fc domain), SEQ ID NO: 1177 (IL-15), and SEQ ID NO: 1177 (NWVNVISDLKKIEDLIQSMHIDATLYTESDVHPSCKVTAMKCFLLELQVISLESGDASIHDT VENLIILANNSLSSNGNVTESGCKECEELEEKNIKEFLQSFVHIVQMFINTS, IL-15). In other words, two moieties of SEQ ID NO: 1179 are complexed with two moieties of SEQ ID NO: 1177 to form the IL-15 agent.

[0242] In some embodiments, the IL-15 agent can be L₀-X-L₁-Y-L₂, wherein one of X or Y can be any one SEQ ID NO: 1177 or SEQ ID NO: 1178 and one of X or Y can be SEQ ID NO: 1179 or SEQ ID NO: 1176. Furthermore, L₀, L₁, and L₂ can comprise any of SEQ ID NO: 1163-SEQ ID NO: 1172, SEQ ID NO: 1139-SEQ ID NO: 1161, or SEQ ID NO: 1359-SEQ ID NO: 1366, or can be Xn, where X is any amino acid and n=1-50 or can be absent. In some embodiments, the IL-15 agent can be a complex of two moieties of SEQ ID NO: 1177 and of SEQ ID NO: 1179. In other embodiments, the IL-15 agent can be a complex of two moieties of SEQ ID NO: 1178 and of SEQ ID NO: 1179. For instance, the IL-15 agent can be L₀-X-L₁-Y-L₂, wherein L₁ can be SEQ ID NO: 1169 or SEQ ID NO: 1163, X can be SEQ ID NO: 1176 or SEQ ID NO: 1179, and Y can be SEQ ID NO: 1177, SEQ ID NO: 1178, in any combination. In addition, peptide-IL-15 agent complexes can comprise any of the complexes of TABLE 4.

[0243] In some embodiments, the IL-15 (NWVNVISDLKKIEDLIQSMHIDATLYTESDVHPSCKVTAMKCFLLELQVISLESGDASIHDT VENLIILANNSLSSNGNVTESGCKECEELEEKNIKEFLQSFVHIVQMFINTS; SEQ ID NO: 1177) part of the IL 15 agent can have one or more of the following mutations: L₄₅D (Bernard et al. J Biol Chem. 2004 Jun. 4;279(23):24313-22), L₄₅E (Bernard et al. J Biol Chem. 2004 Jun. 4;279(23): 24313-22), Q48K (Bernard et al. J Biol Chem. 2004 Jun. 4;279(23):24313-22), V49D (Bernard et al. J Biol Chem. 2004 Jun. 4;279(23):24313-22), S51D (Bernard et al. J Biol Chem. 2004 Jun. 4;279(23):243 13-22), L₅₂D (Bernard et al. J Biol Chem. 2004 Jun. 4;279(23):24313-22), N72D (Zhu 2009 and U.S. Pat. No. 816,3879), N72E (Zhu 2009), N72A (Zhu 2009), N72S (Zhu 2009), N72Y (Zhu 2009), N72R (U.S. Pat. No. 816,3879), D61A (U.S. Pat. No. 816,3879), or any combination thereof. In some embodiments, any one or more than one of the mutations described above can be present in a mutant form of IL-15, or incorporated into SEQ ID NO: 1135-SEQ ID NO: 1138 with numbering appropriate to the IL-15 portion as follows: N72D, L45D, L45E, Q48K, V49D, S51D, L52D, N72E, N72A, N72S, N72Y, N72R, or D61A. It is understood that any combination or number of such mutations can be present in the IL-15 variant or incorporated into SEQ ID NO: 1135-SEQ ID NO: 1138.

[0244] In some embodiments, complexes of a peptide of the present disclosure and an I/O, wherein the I/O is ALT-803, can lead to enhanced intracellular uptake or intratumoral concentration and therapeutic efficacy, including long-term survival and a potent antitumor immune response to a tumor. ALT-803 and IL-15 agent and is described in U.S. Pat. No. 20,140,134128 and Han et al. (Cytokine. 2011 December; 56(3):804-10), which is incorporated herein by reference. The peptide can optionally be fused to the IL-15 N72D portion of the molecule, the IL-15RαSu-Fc portion of the molecule, or any combination thereof, with a cleavable linker or a stable linker. In some embodiments, complexes of a peptide of the present disclosure and an I/O, wherein the I/O is IL-15Rα/IL-15Fc, can lead to enhanced intracellular uptake or intratumoral concentration and therapeutic efficacy, including anti-tumor activity against the tumor. The tumor can be any type of tumor as described herein, such as glioblastoma and melanoma.

[0245] In some embodiments, the IL-15 agent can comprise any IL-15 agent sequence or any fragment or variant thereof that retains function and activity. That is, an IL-15 agent of the present disclosure can be a truncated and/or mutated IL-15 agent, which is still capable of binding the IL-15 receptor and stimulating downstream cellular responses. In some embodiments, the IL-15 agent can comprise a sequence of

(SEQ ID NO: 1491)
NWVNVISDLKKIEDLIQSMHIDATLYTESDVHPSCKVTAMKCFLLELQVIS
LESGDASIHDTVENLIILANNSLSSNGNVTESGCKECEELEEKNIKEFLQS
FVHIVQMFIN.

[0246] In some embodiments, a peptide of the present disclosure can be fused to an IL-15 hyperagonist as shown in SEQ ID NO: 1233 (MAPRRARGCRTLGLPALLLLLLLRPPATRGDYKDDDDKIEGRITCPPPMSVEHADIWVKSY SLYSRERYICNSGFKRKAGTSSLTECVLNKATNVAHWTTPSLKCIRDPALVHQRPAPPGGSG GGGSGGGSGGGGSLQNWVNVISDLKKIEDLIQSMHIDATLYTESDVHPSCKVTAMKCFLLE LQVISLESGDASIHDTVENLIILANNSLSSNGNVTESGCKECEELEEKNIKEFLQSFVHIVQMF INTSX1X₂X₃X₄X₅X₆X₇X₈X₉X₁₀X₁₁X₁₂X₁₃X₁₄X₁₅X₁₆X₁₇X₁₈X₁₉X₂₀X₂₁X₂₂X₂₃X₂₄X₂₅X₂₆X₂₇X₂₈X₂₉X ₃₀X₃₁X₃₂X₃₃X₃₄X₃₅X₃₆X₃₇X₃₈X₃₉X₄₀X₄₁X₄₂X₄₃X₄₄X₄₅X₄₆X₄₇X₄₈X₄₉X₅₀MCMPCFTTDHQMARKC DDCCGGKGRGKCYGPQCLCR) or SEQ ID NO: 1234 (MAPRRARGCRTLGLPALLLLLLLRPPATRGDYKDDDDKIEGRNWVNVISDLKKIEDLIQSM HIDATLYTESDVHPSCKVTAMKCFLLELQVISLESGDASIHDTVENLIILANNSLSSNGNVTE SGCKECEELEEKNIKEFLQSFVHIVQMFINTSSGGGSGGGGSGGGGSGGGGSGGGSLQITCP PPMSVEHADIWVKSYSLYSRERYICNSGFKRKAGTSSLTECVLNKATNVAHWTTPSLKCIR DPAL VHQRPAPP X₁X₂X₃X₄X₅X₆X₇X₈X₉X₁₀X₁₁X₁₂X₁₃X₁₄X₁₅X₁₆X₁₇X₁₈X₁₉X₂₀X₂₁X₂₂X₂₃X₂₄X₂₅X₂₆X₂₇X₂₈X₂₉X₃₀X₃₁ X₃₂X₃₃X₃₄X₃₅X₃₆X₃₇X₃₈X₃₉X₄₀X₄₁X₄₂X₄₃X₄X₄₅X₄₆X₄₇X₄₈X₄₉X₅₀MCMPCFTTDHQMARKCDDC CGGKGRGKCYGPQCLCR), ITCPPPMSVEHADIWVKSYSLYSRERYICNSGFKRKAGTSSLTECVLNKATNVAHWTTPSLK CIRDPAL VHQRPAPPSGGSGGGGSGGGSGGGGSLQNWVNVISDLKKIEDLIQSMHIDATLYT ESDVHPSCKVTAMKCFLLELQVISLESGDASIHDTVENLIILANNSLSSNGNVTESGCKECEE LEEKNIKEFLQSFVHIVQMFINTSX1X₂X₃X₄X₅X₆X₇X₈X₉X₁₀X₁₁X₁₂X₁₃X₁₄X₁₅X₁₆X₁₇X₁₈X₁₉X₂₀X 21X₂₂X₂₃X₂₄X₂₅X₂₆X₂₇X₂₈X₂₉X₃₀X₃₁X₃₂X₃₃X₃₄X₃₅X₃₆X₃₇X₃₈X₃₉X₄₀X₄₁X₄₂X₄₃X₄₄X₄₅X₄₆X₄₇X₄₈X₄₉X ₅₀MCMPCFTTDHQMARKCDDCCGGKGRGKCYGPQCLCR (SEQ ID NO: 1349), or NWVNVISDLKKIEDLIQSMHIDATLYTESDVHPSCKVTAMKCFLLELQVISLESGDASIHDT VENLIILANNSLSSNGNVTESGCKECEELEEKNIKEFLQSFVHIVQMFINTSSGGGSGGGGSG GGGSGGGGSGGGSLQITCPPPMSVEHADIWVKSYSLYSRERYICNSGFKRKAGTSSLTECVL NKATNVAHWTTPSLKCIRDPALVHQRPAPPX1X₂X₃X₄X₅X₆X₇X₈X₉X₁₀X₁₁X₁₂X₁₃X₁₄X₁₅X₁₆X_{1 7}X₁₈X₁₉X₂₀X₂₁X₂₂X₂₃X₂₄X₂₅X₂₆X₂₇X₂₈X₂₉X₃₀X₃₁X₃₂X₃₃X₃₄X₃₅X₃₆X₃₇X₃₈X₃₉X₄₀X+1X₄₂X₄₃X₄₄X₄₅X_{4 6}X₄₇X₄₈X₄₉X₅₀MCMPCFTTDHQMARKCDDCCGGKGRGKCYGPQCLCR (SEQ ID NO: 1350), and can lead to enhanced intracellular uptake or intratumoral concentration and therapeutic efficacy, including long-term survival and a potent antitumor immune response to a tumor. Any one of X₁, X₂. X₃, X₄, X₅, X₆, X₇, X₈, X₉ X₁₀, X₁₁, X₁₂, X₁₃, X₁₄, X₁₅, X₁₆, X₁₇, X₁₈, X₁₉, X₂₀, X₂₁, X₂₂, X₂₃, X₂₄, X₂₅, X₂₆. X₂₇, X₂₈, X₂₉, X₃₀, X₃₁, X₃₂, X₃₃, X₃₄, X₃₅, X₃₆, X₃₇, X₃₈, X₃₉, X₄₀, X₄₁, X₄₂, X₄₃, X₄₄, X₄₅, X₄₆, X₄₇, X₄₈, X₄₉. and X₅₀ in SEQ ID NO: 1233, SEQ ID NO: 1234, or SEQ ID NO: 1349, or SEQ ID NO: 1350 can each individually be any amino acid residue or can be absent. In some embodiments, any one of X₁. X₂, X₃, X₄, X₅, X₆, X₇, Xx, X₉, X₁₀, X₁₁, X₁₂, X₁₃, X₁₄, X₁₅, X₁₆, X₁₇, X₁₈, X₁₉ X₂₀, X₂₁, X₂₂, X₂₃, X₂₄, X₂₅, X₂₆. X₂₇, X₂₈, X₂₉, X₃₀, X₃₁, X₃₂, X₃₃, X₃₄, X₃₅, X₃₆, X₃₇, X₃₈, X₃₉, X₄₀, X₄₁, X₄₂, X₄₃, X₄₄, X₄₅, X₄₆, X₄₇, X₄₈, X₄₉. and X₅₀ can comprise any cleavable linker of the present disclosure, such as any one of SEQ ID NO: 1139-SEQ ID NO: 1161, SEQ ID NO: 1360-SEQ ID NO: 1363, or SEQ ID NO: 1365. In some embodiments, any one of X₁, X₂, X₃, X₄, X₅, X₆, X₇, X₈, X₉ X₁₀, X₁₁, X₁₂, X₁₃, X₁₄, X₁₅, X₁₆, X₁₇, X₁₈, X₁₉. X₂₀, X₂₁, X₂₂, X₂₃, X₂₄, X₂₅, X₂₆, X₂₇, X₂₈, X₂₉, X₃₀, X₃₁, X₃₂, X₃₃, X₃₄, X₃₅, X₃₆, X₃₇, X₃₈, X₃₉, X₄₀, X₄₁, X₄₂. X₄₃, X₄₄, X₄₅, X₄₆, X₄₇, X₄₈, X₄₉ and X₅₀ can comprise a stable linker, such as any one of SEQ ID NO: 1163-SEQ ID NO: 1172 or any one of SEQ ID NO: 1359, SEQ ID NO: 1364, SEQ ID NO: 1366, and can optionally further comprise a cleavable linker. Said fusions can be preceded by a signal peptide, an exemplary sequence of which is shown in SEQ ID NO: 1232 (MAPRRARGCRTLGLPALLLLLLLRPPATRG) or an IgG kappa leader sequence (METDTLLLWVLLLWVPGSTG; SEQ ID NO: 1367) and can also be preceded or followed by a purification tag, such as FLAG-Xa (DYKDDDDKIEGR), as shown in SEQ ID NO: 1162 or a His tag, such as Hisx where x=1-20 (SEQ ID NO: 1368). SEQ ID NO: 1233 and SEQ ID NO: 1234 are shown in FIG. 3 and FIG. 4, respectively, X in FIG. 3 and FIG. 4 represents X₁X₂X₃X₄X₅X₆X₇X₈X₉X₁₀X₁₁X₁₂X₁₃X₁₄X₁₅X₁₆X₁₇X₁₈X₁₉X₂₀X₂₁X₂₂X₂₃X₂₄X₂₅X₂₆X₂₇X₂₈X₂₉X₃₀X₃₁ X₃₂X₃₃X₃₄X₃₅X₃₆X₃₇X₃₈X₃₉X₄₀X₄₁X₄₂X₄₃X₄X₄₅X₄₆X₄₇X₄₈X₄₉X₅₀.

[0247] Because IL-15 is active extracellularly in tumors, the present disclosure can provide a peptide-I/O complex comprising a peptide-IL-15 agent complex in which the peptide can home, distribute to, target, migrate to, be processed by, or accumulate in the tumor microenvironment. Subsequently, the peptide can mediate cell penetration, allowing for intracellular processing to release IL-15 optionally from the peptide-I/O complex at a higher local concentration or with a higher bioactivity or at the cell surface, or the peptide can mediate tumor penetration, and/or extracellular delivery of IL-15 in the tumor microenvironment. In some embodiments, the peptide-IL-15 agent complex can comprise an IL-15 agent that is chemically conjugated or recombinantly expressed as a fusion with a peptide of this disclosure. In these cases, the peptide and IL-15 agent can optionally be linked with a cleavable linker, such that the linker can be cleaved selectively in the tumor microenvironment or in the tumor cells and thereby releases IL-15 in high concentrations and/or at a higher potency after cleavage. Alternatively, the peptide and IL-15 agent can be linked with a stable linker and can be active as a peptide-IL-15 agent complex, or the linker can be cleaved by catabolismin some embodiments, the peptide and I/O may be cleaved, dissociated, degraded, processed as additionally described herein. In some embodiments, the IL-15 agent can access intracellular compartments, such as the endosome, lysosome, endoplasmic reticulum, or Golgi apparatus due to the cell penetrating properties of the peptide. In such cases, the linker can be acid labile and can be cleaved in the acidic environment of the endosome or can be enzymatically cleavable or can be cleaved by reduction. This can be followed by cytokine recycling to the cell surface, at which location cleavage can optionally occur. In other embodiments, the peptide-IL-15 agent complex is co-formulated. In some embodiments, the peptide-IL-15 agent complex is formulated in a delivery vehicle, such as a liposome. For example, liposome particles can be coated with a peptide of the present disclosure and can additionally formulate IL-15. Particulate vehicles can have enhanced cellular uptake into intracellular compartments, thereby allowing for greater concentrations of IL-15 to access cytokine recycling pathways. In other embodiments, an IL-15 mRNA agent can be encapsulated in a liposome, which can be further coated with a peptide of the present disclosure. In other embodiments, an IL-15 agent can be encoded for by an expression vector. DNA can be encapsulated in a liposome, which can be further coated with a peptide of the present disclosure. For this, a promoter can be used in the expression vector such that the IL-15 agent is only actively expressed once in cancer cells. In some embodiments, any one of the IL-15 agents shown below in TABLE 3 can be an I/O complexed with any peptide of the present disclosure. Other IL-15 agents that can be used as an I/O in the present application include those described in Chertova et al. (J Biol Chem. 2013 June; 288(25): 18093-103), Ochoa et al. (Cancer Res. 2012; 73(1): 139-149), Bouchaud et al. (J Mol Biol. 2008; 283: 1-12), Kermer et al. (Mol Cancer Ther. 2012 June; 11(6): 1279-1288), Kermer et al. (Mol Cancer Ther. 2014 January; 13(1): 112-121), Dubois et al. (J Immunol. 2008; 180: 2099-2106), Cheng et al. (OncoImmunology. 2014 November; 3(11): e963409), Stone et al. (Biotechnol Prog. 2012 November; 28(6): 1588-1597), Wong et al. (Protectin Engineering, Design, & Selection. 2011; 24(4):373-383), Wu and Xu. (Journal of Molecular Cell Biology. 2010; 2:217-222), all of which are incorporated herein in their entirety by reference.

[0248] The peptide-IL-15 agent complex can be a peptide fusion designed, as a prodrug, to be significantly less potent than the IL-15 agent alone in order to minimize toxicity. The uptake and processing of this peptide-IL-15 agent complex by tumor target cells can result in the removal of the peptide from the peptide-IL-15 agent complex, and can result in the restoration of higher or full potency of the IL-15 agent. This prodrug configuration can enable administration of higher doses of the IL-15 agent than otherwise possible. The combination of tumor targeting and prodrug configuration of the peptide-IL-15 agent complexes can improve the therapeutic efficacy of IL-15 therapy.

[0249] Prodrug cleavage and release of fully potent IL-15 agent from the peptide-IL-15 agent complex can also take place at the cell surface and/or in the tumor microenvironment due to surface expressed or secreted enzymes. This process may release higher levels of drug in the tumor compared with the circulation, enabling administration of effective doses with less systemic toxicity.

[0250] In some cases, the peptide-IL-15 agent complex may only be modified after review for potential ligand/receptor interaction. For example the region including D8 of an IL-15 agent interacts with the IL-2/15 receptor beta chain and this interaction may be preserved for a fully functioning ligand/receptor complex. Similarly, PEGylation of the two freely accessible lysines, K10 and K11, results in an IL-15 agent that may be unable to signal because of the disrupted interaction with the IL-2/15 receptor beta chain. The region of an IL-15agent including Q108 can interact with the common gamma receptor chain and may be preserved for a fully functioning ligand/receptor complex (Pettit et.al 1997). O- and/or N-linked glycosylation of an IL-15 agent may not be required for active signaling or ligand/receptor interaction because the IL-15 agent may be produced from E. coli-based production systems, which may be incapable of producing O- or N-linked glycosylated proteins, and can be active in biological assays. Thus, IL-15 itself may or may not be glycosylated and may be produced in cells that do not glycosylate, such as E. coli, or cells that do glycosylate, such as CHO, pichia, or HEK cells.

[0251] In some embodiments, the IL-15 agent is a complex comprising two polypeptides having a sequence of SEQ ID NO: 1179 associated with a polypeptide having a sequence of SEQ ID NO: 1177 (native IL-15). In particular embodiments, this IL-15 agent comprises a complex, wherein the two polypeptides of SEQ ID NO: 1179 are covalently linked by a disulfide linkage and are further non-covalently associated through high affinity bonding between each of SEQ ID NO: 1179 and SEQ ID NO: 1177.

[0252] In some embodiments, the IL-15 agent comprises a complex of two polypeptides having a sequence of SEQ ID NO: 1179 associated with two polypeptides having a sequence of SEQ ID NO: 1178 (N72D mutant of IL-15. In particular embodiments, this IL-15 agent comprises a complex, wherein the two polypeptides of SEQ ID NO: 1179 are covalently linked by a disulfide linkage and are further non-covalently associated through high affinity bnding between each of SEQ ID NO: 1179 and SEQ ID NO: 1178.

[0253] As used herein “RLI” or “ILR” is used as an abbreviation used to described an I/O that is a IL-15 agent comprising a complex of polynucleotides or peptides that link an IL-15 “receptor” (meaning any of the IL-15 receptor variants or fragments as described herein) with an IL-15R “ligand” (meaning any of the IL-15 variants or fragments described herein), in any combination of the foregoing, and any fragments thereof.

TABLE 3
IL-15 Agent Sequences

| SEQ ID NO | | |
|---|---|---|
| (if applicable) | IL-15 Agent Sequences | Description |
| SEQ ID NO: | ITCPPPMSVEHADIWVKSYSLYSRERYI | IL-15Ra, a linker, and |
| 1135 | CNSGFKRKAGTSSLTECVLNKATNVA | IL-15 (referred to as an |
| | HWTTPSLKCIRDPALVHQRPAPPGGSG | exemplary “RLI” from |
| | GGGSGGGSGGGGSLQNWVNVISDLKKIE | the N to C-terminus |
| | DLIQSMHIDATLYTESDVHPSCKVTAMKCF | direction). IL-15Rα |
| | LLELQVISLESGDASIHDTVENLIILANNSLSS | sushi+ is bolded and IL- |
| | NGNVTESGCKECEELEEKNIKEFLQSFVHI | 15 is italicized. |
| | VQMFINTS | |
| SEQ ID NO: | NWVNVISDLKKIEDLIQSMHIDATLYTESDV | IL-15, a linker, and IL- |
| 1136 | HPSCKVTAMKCFLLELQVISLESGDASIHD | 15Ra (referred to as an |
| | TVENLIILANNSLSSNGNVTESGCKECEELE | exemplary “ILR” from |
| | EKNIKEFLQSFVHIVQMFINTSSGGGSGGG | the N to C-terminus |
| | GSGGGGSGGGGSGGGSLQITCPPPMSV | direction). IL-15Rα |
| | EHADIWVKSYSLYSRERYICNSGFKRK | sushi+ is bolded and IL- |
| | AGTSSLTECVLNKATNVAHWTTPSLK | 15 is italicized. |
| | CIRDPALVHQRPAPP | |
| SEQ ID NO: | ITCPPPMSVEHADIWVKSYSLYSRERYI | An RLI with N72D |
| 1137 | CNSGFKRKAGTSSLTECVLNKATNVA | mutation. |
| | HWTTPSLKCIRDPALVHQRPAPPGGSG | IL-15Ra, a linker, and |
| | GGGSGGGSGGGGSLQNWVNVISDLKKIE | IL-15 (referred to as |
| | DLIQSMHIDATLYTESDVHPSCKVTAMKCF | “RLI” from the N to C- |
| | LLELQVISLESGDASIHDTVENLIILANDSLS | terminus direction). IL- |
| | SNGNVTESGCKECEELEEKNIKEFLQSFVH | 15Ra sushi+ sequence is |
| | IVQMFINTS | bolded. IL-15 sequence |
| | | is italicized |
| SEQ ID NO: | NWVNVISDLKKIEDLIQSMHIDATLYTESDV | An ILR with N72D |
| 1138 | HPSCKVTAMKCFLLELQVISLESGDASIHD | mutation. |
| | TVENLIILANDSLSSNGNVTESGCKECEELE | IL-15, a linker, and IL- |
| | EKNIKEFLQSFVHIVQMFINTSSGGGSGGG | 15Ra (referred to as |
| | GSGGGGSGGGGSGGGSLQITCPPPMSV | “ILR” from the N to C- |
| | EHADIWVKSYSLYSRERYICNSGFKRK | terminus direction). IL- |
| | AGTSSLTECVLNKATNVAHWTTPSLK | 15Ra sushi+ sequence is |
| | CIRDPALVHQRPAPP | bolded. IL-15 sequence |
| | | is italicized |
| SEQ ID NO: | NWVNVISDLKKIEDLIQSMHIDATLYTES | Mature, secreted form of |
| 1177 | DVHPSCKVTAMKCFLLELQVISLESGDA | IL-15 |
| | SIHDTVENLIILANNSLSSNGNVTESGCK | |
| | ECEELEEKNIKEFLQSFVHIVQMFINTS | |
| SEQ ID NO: | NWVNVISDLKKIEDLIQSMHIDATLYTES | N72D form of IL-15 |
| 1178 | DVHPSCKVTAMKCFLLELQVISLESGDA | |
| | SIHDTVENLIILANDSLSSNGNVTESGCK | |
| | ECEELEEKNIKEFLQSFVHIVQMFINTS | |
| | Two polypeptides having a sequence of SEQ | Complex using native |
| | ID NO: 1179 associated with two | IL-15 |
| | polypeptides having a sequence of SEQ ID | |
| | NO: 1177 | |
| | Two polypeptides having a sequence of SEQ | Complex using N72D |
| | ID NO: 1179 associated with two | IL-15 |
| | polypeptides having a sequence of SEQ ID | |
| | NO: 1178 | |
| SEQ ID NO: | NWVNVISDLKKIEDLIQSMHIDATLYTES | Minimal form of IL-15 |
| 1491 | DVHPSCKVTAMKCFLLELQVISLESGDA | |
| | SIHDTVENLIILANNSLSSNGNVTESGCK | |
| | ECEELEEKNIKEFLQSFVHIVQMFIN | |
| SEQ ID NO: | HHHHHHHHHHITCPPPMSVEHADIWV | A His-tagged RLI; His |
| 1342 | KSYSLYSRERYICNSGFKRKAGTSSLTEC | tag is shown in bold, the |
| | VLNKATNVAHWTTPSLKCIRDPALVHQ | sushi domain is shown in |
| | RPAPPSGGSGGGGSGGGSGGGGSLQNWV | underlining, the IL-15 |
| | NVISDLKKIEDLIQSMHIDATLYTESDV | agent linker is shown in |
| | HPSCKVTAMKCFLLELQVISLESGDAS | italics, the IL-15 agent is |
| | IHDTVENLIILANNSLSSNGNVTESGCK | shown in bold and |
| | ECEELEEKNIKEFLQSFVHIVQMFINTS | underlining |
| SEQ ID NO: | ITCPPPMSVEHADIWVKSYSLYSRERYIC | IL-15 sushi+; Sushi |
| 1176 | NSGFKRKAGTSSLTECVLNKATNVAHW | domain encoded by |
| | TTPSLKCIRDPALVHQRPAPP | Exon 2 plus the N |
| | | terminal 13 aa encoded |
| | | by Exon 3 (Bouchard |
| | | 2008) |
| SEQ ID NO: | ITCPPPMSVEHADIWVKSYSLYSRERYICNSG | IL-15Ra Sushi+ |
| 1432 | FKRKAGTSSLTECVLNKATNVAHWTTPSLK | followed by IgG1 hinge |
| | CIRDPALVHQRPAPPEPKSCDKTHTCPPCPAP | and CH2 + CH3 regions |
| | ELLGGPSVFLFPPKPKDTLMISRTPEVTCVVV | (Fc) |
| | DVSHEDPEVKFNWYVDGVEVHNAKTKPRE | |
| | EQYNSTYRVVSVLTVLHQDWLNGKEYKCK | |
| | VSNKALPAPIEKTISKAKGQPREPQVYTLPPS | |
| | RDELTKNQVSLTCLVKGFYPSDIAVEWESNG | |
| | QPENNYKTTPPVLDSDGSFFLYSKLTVDKSR | |
| | WQQGNVFSCSVMHEALHNHYTQKSLSLSPG | |
| | K | |
| | Two polypeptides having a sequence of SEQ | |
| | ID NO: 1432 associated with two | |
| | polypeptides having a sequence of SEQ ID | |
| | NO: 1177 | |
| | Two polypeptides having a sequence of SEQ | |
| | ID NO: 1432 associated with two | |
| | polypeptides having a sequence of SEQ ID | |
| | NO: 1178 | |
| SEQ ID NO: | ITCPPPMSVEHADIWVKSYSLYSRERYICNSG | Complete IL-15Ra |
| 1433 | FKRKAGTSSLTECVLNKATNVAHWTTPSLK | followed by IgG1 hinge |
| | CIRDPALVHQRPAPPSTVTTAGVTPQPESLSP | and CH2 + CH3 regions |
| | SGKEPAASSPSSNNTAATTAAIVPGSQLMPS | (Fc) |
| | KSPSTGTTEISSHESSHGTPSQTTAKNWELTA | |
| | SASHQPPGVYPQGHSDTTEPKSCDKTHTCPP | |
| | CPAPELLGGPSVFLFPPKPKDTLMISRTPEVT | |
| | CVVVDVSHEDPEVKFNWYVDGVEVHNAKT | |
| | KPREEQYNSTYRVVSVLTVLHQDWLNGKEY | |
| | KCKVSNKALPAPIEKTISKAKGQPREPQVYT | |
| | LPPSRDELTKNQVSLTCLVKGFYPSDIAVEW | |
| | ESNGQPENNYKTTPPVLDSDGSFFLYSKLTV | |
| | DKSRWQQGNVFSCSVMHEALHNHYTQKSL | |
| | SLSPGK | |
| | Two polypeptides having a sequence of SEQ | |
| | ID NO: 1433 associated with two | |
| | polypeptides having a sequence of SEQ ID | |
| | NO: 1177 | |
| | Two polypeptides having a sequence of SEQ | |
| | ID NO: 1433 associated with two | |
| | polypeptides having a sequence of SEQ ID | |
| | NO: 1178 | |
| SEQ ID NO: | ITCPPPMSVEHADIWVKSYSLYSRERYIC | An RLI, containing SEQ |
| 1501 | NSGFKRKAGTSSLTECVLNKATNVAHW | ID NO: 1176, SEQ ID |
| | TTPSLKCIRDPALVHQRPAPPSGGSGGGG | NO: 1177, and SEQ ID |
| | SGGGSGGGGSLQNWVNVISDLKKIEDLI | NO: 1169 |
| | QSMHIDATLYTESDVHPSCKVTAMKCFL | |
| | LELQVISLESGDASIHDTVENLIILANNSL | |
| | SSNGNVTESGCKECEELEEKNIKEFLQSF | |
| | VHIVQMFINTS | |
| SEQ ID NO: | ITCPPPMSVEHADIWVKSYSLYSRERYIC | An RLI with N72D |
| 1502 | NSGFKRKAGTSSLTECVLNKATNVAHW | mutation, |
| | TTPSLKCIRDPALVHQRPAPPSGGSGGGG | IL-15Ra, a linker, and |
| | SGGGSGGGGSLQNWVNVISDLKKIEDLIQS | IL-15 (referred to as |
| | MHIDATLYTESDVHPSCKVTAMKCFLLELQ | “RLI” from the N to C- |
| | VISLESGDASIHDTVENLIILANDSLSSNGNV | terminus direction). IL- |
| | TESGCKECEELEEKNIKEFLQSFVHIVQMF | 15Ra sushi+ sequence is |
| | INTS | underlined. IL-15 |
| | | sequence is italicized; |
| | | contains SEQ ID NO: |
| | | 1176, SEQ ID NO: |
| | | 1169, and SEQ ID NO: |
| | | 1178 |

[0254] TABLE 4 below shows sequence of peptide-IL-15 agent complexes. For SEQ ID NO: 1317-SEQ ID NO: 1358 and SEQ ID NO: 1428-SEQ ID NO: 1431 in TABLE 4, the tag is shown in bold, the sushi domain is shown in underlining, the IL-15 agent linker is shown in italics, the IL-15 agent is shown in bold and underlining, the linker to the peptide is shown in bold and italics, the cleavable site is shown in italics and underlining, and the peptide is unformatted. For SEQ ID NO: 1434-SEQ ID NO: 1441 in TABLE 4 below show an IL-15Rα Sushi followed by IgG1 hinge (bold), a CH2+CH3 regions (Fc) (no formatting), a flexible linker (SEQ ID NO: 1359 or SEQ ID NO: 1362) (underlining), and a peptide of SEQ ID NO: 569 (shown in italics).

TABLE 4
Peptide-IL-15 Agent Complexes

| SEQ ID NO | Sequence |
|---|---|
| SEQ ID NO: 1317 | HHHHHHHHHHITCPPPMSVEHADIWVKSYSLYSRERYICNSG |
| | FKRKAGTSSLTECVLNKATNVAHWTTPSLKCIRDPALVHQRPA |
| | PPSGGSGGGGSGGGSGGGGSLQNWVNVISDLKKIEDLIQSMHI |
| | DATLYTESDVHPSCKVTAMKCFLLELQVISLESGDASIHDT |
| | VENLIILANNSLSSNGNVTESGCKECEELEEKNIKEFLQSFV |
| | HIVQMFINTSGGGGSGGGGSVAGGGGSGGGGSMCMPCFTTDH |
| | QMARKCDDCCGGKGRGKCYGPQCLCR |
| SEQ ID NO: 1318 | HHHHHHHHHHNWVNVISDLKKIEDLIQSMHIDATLYTESD |
| | VHPSCKVTAMKCFLLELQVISLESGDASIHDTVENLIILANN |
| | SLSSNGNVTESGCKECEELEEKNIKEFLQSFVHIVQMFINTS |
| | SGGGSGGGGSGGGGSGGGGSGGGSLQITCPPPMSVEHADIWVK |
| | SYSLYSRERYICNSGFKRKAGTSSLTECVLNKATNVAHWTTPS |
| | LKCIRDPALVHQRPAPPGGGGSGGGGSVAGGGGSGGGGSMCM |
| | PCFTTDHQMARKCDDCCGGKGRGKCYGPQCLCR |
| SEQ ID NO: 1319 | HHHHHHHHHHITCPPPMSVEHADIWVKSYSLYSRERYICNSG |
| | FKRKAGTSSLTECVLNKATNVAHWTTPSLKCIRDPALVHQRPA |
| | PPSGGSGGGGSGGGSGGGGSLQNWVNVISDLKKIEDLIQSMHI |
| | DATLYTESDVHPSCKVTAMKCFLLELQVISLESGDASIHDT |
| | VENLIILANNSLSSNGNVTESGCKECEELEEKNIKEFLQSFV |
| | HIVQMFINTSAEAAAKEAAAKAVAAEAAAKEAAAKAMCMPCF |
| | TTDHQMARKCDDCCGGKGRGKCYGPQCLCR |
| SEQ ID NO: 1320 | MCMPCFTTDHQMARKCDDCCGGKGRGKCYGPQCLCRGGGGS |
| | GGGGSVAGGGGSGGGGSITCPPPMSVEHADIWVKSYSLYSRE |
| | RYICNSGFKRKAGTSSLTECVLNKATNVAHWTTPSLKCIRDPA |
| | LVHQRPAPPSGGSGGGGSGGGSGGGGSLQNWVNVISDLKKIE |
| | DLIQSMHIDATLYTESDVHPSCKVTAMKCFLLELQVISLESG |
| | DASIHDTVENLIILANNSLSSNGNVTESGCKECEELEEKNIKE |
| | FLQSFVHIVQMFINTSHHHHHHHHHH |
| SEQ ID NO: 1321 | HHHHHHHHHHITCPPPMSVEHADIWVKSYSLYSRERYICNSG |
| | FKRKAGTSSLTECVLNKATNVAHWTTPSLKCIRDPALVHQRPA |
| | PPSGGSGGGGSGGGSGGGGSLQNWVNVISDLKKIEDLIQSMHI |
| | DATLYTESDVHPSCKVTAMKCFLLELQVISLESGDASIHDT |
| | VENLIILANNSLSSNGNVTESGCKECEELEEKNIKEFLQSFV |
| | HIVQMFINTSGGGGSGGGGSGGGGSMCMPCFTTDHQMARKC |
| | DDCCGGKGRGKCYGPQCLCR |
| SEQ ID NO: 1322 | DYKDDDDKIEGRITCPPPMSVEHADIWVKSYSLYSRERYICNS |
| | GFKRKAGTSSLTECVLNKATNVAHWTTPSLKCIRDPALVHQRP |
| | APPSGGSGGGGSGGGSGGGGSLQNWVNVISDLKKIEDLIQSM |
| | HIDATLYTESDVHPSCKVTAMKCFLLELQVISLESGDASIHD |
| | TVENLIILANNSLSSNGNVTESGCKECEELEEKNIKEFLQSF |
| | VHIVQMFINTSGGGGSGGGGSVAGGGGSGGGGSMCMPCFTTD |
| | HQMARKCDDCCGGKGRGKCYGPQCLCR |
| SEQ ID NO: 1323 | HHHHHHHHHHITCPPPMSVEHADIWVKSYSLYSRERYICNSG |
| | FKRKAGTSSLTECVLNKATNVAHWTTPSLKCIRDPALVHQRPA |
| | PPSGGSGGGGSGGGSGGGGSLQNWVNVISDLKKIEDLIQSMHI |
| | DATLYTESDVHPSCKVTAMKCFLLELQVISLESGDASIHDT |
| | VENLIILANNSLSSNGNVTESGCKECEELEEKNIKEFLQSFV |
| | HIVQMFINTSGGGGSGGGGSPLGLAGGGGGSGGGGSMCMPCF |
| | TTDHQMARKCDDCCGGKGRGKCYGPQCLCR |
| SEQ ID NO: 1324 | HHHHHHHHHHNWVNVISDLKKIEDLIQSMHIDATLYTESD |
| | VHPSCKVTAMKCFLLELQVISLESGDASIHDTVENLIILANN |
| | SLSSNGNVTESGCKECEELEEKNIKEFLQSFVHIVQMFINTS |
| | SGGGSGGGGSGGGGSGGGGSGGGSLQITCPPPMSVEHADIWV |
| | KSYSLYSRERYICNSGFKRKAGTSSLTECVLNKATNVAHWTTP |
| | SLKCIRDPALVHQRPAPPGGGGSGGGGSGGGGSMCMPCFTTD |
| | HQMARKCDDCCGGKGRGKCYGPQCLCR |
| SEQ ID NO: 1325 | HHHHHHHHHHITCPPPMSVEHADIWVKSYSLYSRERYICNSG |
| | FKRKAGTSSLTECVLNKATNVAHWTTPSLKCIRDPALVHQRPA |
| | PPSGGSGGGGSGGGSGGGGSLQNWVNVISDLKKIEDLIQSMHI |
| | DATLYTESDVHPSCKVTAMKCFLLELQVISLESGDASIHDT |
| | VENLIILANNSLSSNGNVTESGCKECEELEEKNIKEFLQSFV |
| | HIVQMFINTSAEAAAKEAAAKEAAAKAMCMPCFTTDHQMAR |
| | KCDDCCGGKGRGKCYGPQCLCR |
| SEQ ID NO: 1326 | HHHHHHHHHHMCMPCFTTDHQMARKCDDCCGGKGRGKCY |
| | GPQCLCRGGGGSGGGGSGGGGSITCPPPMSVEHADIWVKSYSL |
| | YSRERYICNSGFKRKAGTSSLTECVLNKATNVAHWTTPSLKCI |
| | RDPALVHQRPAPPSGGSGGGGSGGGSGGGGSLQNWVNVISDL |
| | KKIEDLIQSMHIDATLYTESDVHPSCKVTAMKCFLLELQVIS |
| | LESGDASIHDTVENLIILANNSLSSNGNVTESGCKECEELEE |
| | KNIKEFLQSFVHIVQMFINTS |
| SEQ ID NO: 1327 | HHHHHHHHHHNWVNVISDLKKIEDLIQSMHIDATLYTESD |
| | VHPSCKVTAMKCFLLELQVISLESGDASIHDTVENLIILANN |
| | SLSSNGNVTESGCKECEELEEKNIKEFLQSFVHIVQMFINTS |
| | SGGGSGGGGSGGGGSGGGGSGGGSLQITCPPPMSVEHADIWVK |
| | SYSLYSRERYICNSGFKRKAGTSSLTECVLNKATNVAHWTTPS |
| | LKCIRDPALVHQRPAPPGGGGSGGGGSPLGLAGGGGGSGGGGS |
| | MCMPCFTTDHQMARKCDDCCGGKGRGKCYGPQCLCR |
| SEQ ID NO: 1328 | HHHHHHHHHHITCPPPMSVEHADIWVKSYSLYSRERYICNSG |
| | FKRKAGTSSLTECVLNKATNVAHWTTPSLKCIRDPALVHQRPA |
| | PPSGGSGGGGSGGGSGGGGSLQNWVNVISDLKKIEDLIQSMHI |
| | DATLYTESDVHPSCKVTAMKCFLLELQVISLESGDASIHDT |
| | VENLIILANNSLSSNGNVTESGCKECEELEEKNIKEFLQSFV |
| | HIVQMFINTSGSVAGSCMPCFTTDHQMARRCDDCCGGRGR |
| | GKCYGPQCLCR |
| SEQ ID NO: 1329 | MCMPCFTTDHQMARRCDDCCGGRGRGKCYGPQCLCRGGGGS |
| | VAGGGGSNWVNVISDLKKIEDLIQSMHIDATLYTESDVHPSC |
| | KVTAMKCFLLELQVISLESGDASIHDTVENLIILANNSLSSN |
| | GNVTESGCKECEELEEKNIKEFLQSFVHIVQMFINTSSGGGS |
| | GGGGSGGGGSGGGGSGGGSLQITCPPPMSVEHADIWVKSYSLY |
| | SRERYICNSGFKRKAGTSSLTECVLNKATNVAHWTTPSLKCIR |
| | DPALVHQRPAPPHHHHHHHHHH |
| SEQ ID NO: 1330 | ITCPPPMSVEHADIWVKSYSLYSRERYICNSGFKRKAGTSSLTE |
| | CVLNKATNVAHWTTPSLKCIRDPALVHQRPAPPSGGSGGGGSG |
| | GGSGGGGSLQNWVNVISDLKKIEDLIQSMHIDATLYTESDVH |
| | PSCKVTAMKCFLLELQVISLESGDASIHDTVENLIILANNSLS |
| | SNGNVTESGCKECEELEEKNIKEFLQSFVHIVQMFINTSGGGGS |
| | GGGGSVAGGGGSGGGGSMCMPCFTTDHQMARKCDDCCGG |
| | KGRGKCYGPQCLCR |
| SEQ ID NO: 1331 | NWVNVISDLKKIEDLIQSMHIDATLYTESDVHPSCKVTAMK |
| | CFLLELQVISLESGDASIHDTVENLIILANNSLSSNGNVTESG |
| | CKECEELEEKNIKEFLQSFVHIVQMFINTSSGGGSGGGGSGG |
| | GGSGGGGSGGGSLQITCPPPMSVEHADIWVKSYSLYSRERYICN |
| | SGFKRKAGTSSLTECVLNKATNVAHWTTPSLKCIRDPALVHQR |
| | PAPPGGGGSGGGGSVAGGGGSGGGGSMCMPCFTTDHQMARK |
| | CDDCCGGKGRGKCYGPQCLCR |
| SEQ ID NO: 1332 | ITCPPPMSVEHADIWVKSYSLYSRERYICNSGFKRKAGTSSLTE |
| | CVLNKATNVAHWTTPSLKCIRDPALVHQRPAPPSGGSGGGGSG |
| | GGSGGGGSLQNWVNVISDLKKIEDLIQSMHIDATLYTESDVH |
| | PSCKVTAMKCFLLELQVISLESGDASIHDTVENLIILANNSLS |
| | SNGNVTESGCKECEELEEKNIKEFLQSFVHIVQMFINTSAEAAA |
| | KEAAAKAVAAEAAAKEAAAKAMCMPCFTTDHQMARKCDD |
| | CCGGKGRGKCYGPQCLCR |
| SEQ ID NO: 1333 | MCMPCFTTDHQMARKCDDCCGGKGRGKCYGPQCLCRGGGGS |
| | GGGGSVAGGGGSGGGGSITCPPPMSVEHADIWVKSYSLYSRE |
| | RYICNSGFKRKAGTSSLTECVLNKATNVAHWTTPSLKCIRDPA |
| | LVHQRPAPPSGGSGGGGSGGGSGGGGSLQNWVNVISDLKKIE |
| | DLIQSMHIDATLYTESDVHPSCKVTAMKCFLLELQVISLESG |
| | DASIHDTVENLIILANNSLSSNGNVTESGCKECEELEEKNIKE |
| | FLQSFVHIVQMFINTS |
| SEQ ID NO: 1334 | ITCPPPMSVEHADIWVKSYSLYSRERYICNSGFKRKAGTSSLTE |
| | CVLNKATNVAHWTTPSLKCIRDPALVHQRPAPPSGGSGGGGSG |
| | GGSGGGGSLQNWVNVISDLKKIEDLIQSMHIDATLYTESDVH |
| | PSCKVTAMKCFLLELQVISLESGDASIHDTVENLIILANNSLS |
| | SNGNVTESGCKECEELEEKNIKEFLQSFVHIVQMFINTSGGGGS |
| | GGGGSGGGGSMCMPCFTTDHQMARKCDDCCGGKGRGKC |
| | YGPQCLCR |
| SEQ ID NO: 1335 | ITCPPPMSVEHADIWVKSYSLYSRERYICNSGFKRKAGTSSLTE |
| | CVLNKATNVAHWTTPSLKCIRDPALVHQRPAPPSGGSGGGGSG |
| | GGSGGGGSLQNWVNVISDLKKIEDLIQSMHIDATLYTESDVH |
| | PSCKVTAMKCFLLELQVISLESGDASIHDTVENLIILANNSLS |
| | SNGNVTESGCKECEELEEKNIKEFLQSFVHIVQMFINTSGGGGS |
| | GGGGSPLGLAGGGGGSGGGGSMCMPCFTTDHQMARKCDD |
| | CCGGKGRGKCYGPQCLCR |
| SEQ ID NO: 1336 | NWVNVISDLKKIEDLIQSMHIDATLYTESDVHPSCKVTAMK |
| | CFLLELQVISLESGDASIHDTVENLIILANNSLSSNGNVTESG |
| | CKECEELEEKNIKEFLQSFVHIVQMFINTSSGGGSGGGGSGG |
| | GGSGGGGSGGGSLQITCPPPMSVEHADIWVKSYSLYSRERYICN |
| | SGFKRKAGTSSLTECVLNKATNVAHWTTPSLKCIRDPALVHQR |
| | PAPPGGGGSGGGGSGGGGSMCMPCFTTDHQMARKCDDCCGG |
| | KGRGKCYGPQCLCR |
| SEQ ID NO: 1337 | ITCPPPMSVEHADIWVKSYSLYSRERYICNSGFKRKAGTSSLTE |
| | CVLNKATNVAHWTTPSLKCIRDPALVHQRPAPPSGGSGGGGSG |
| | GGSGGGGSLQNWVNVISDLKKIEDLIQSMHIDATLYTESDVH |
| | PSCKVTAMKCFLLELQVISLESGDASIHDTVENLIILANNSLS |
| | SNGNVTESGCKECEELEEKNIKEFLQSFVHIVQMFINTSAEAAA |
| | KEAAAKEAAAKAMCMPCFTTDHQMARKCDDCCGGKGRGK |
| | CYGPQCLCR |
| SEQ ID NO: 1338 | MCMPCFTTDHQMARKCDDCCGGKGRGKCYGPQCLCRGGGGS |
| | GGGGSGGGGSITCPPPMSVEHADIWVKSYSLYSRERYICNSGF |
| | KRKAGTSSLTECVLNKATNVAHWTTPSLKCIRDPALVHQRPAP |
| | PSGGSGGGGSGGGSGGGGSLQNWVNVISDLKKIEDLIQSMHID |
| | ATLYTESDVHPSCKVTAMKCFLLELQVISLESGDASIHDTVE |
| | NLIILANNSLSSNGNVTESGCKECEELEEKNIKEFLQSFVHIV |
| | QMFINTS |
| SEQ ID NO: 1339 | NWVNVISDLKKIEDLIQSMHIDATLYTESDVHPSCKVTAMK |
| | CFLLELQVISLESGDASIHDTVENLIILANNSLSSNGNVTESG |
| | CKECEELEEKNIKEFLQSFVHIVQMFINTSSGGGSGGGGSGG |
| | GGSGGGGSGGGSLQITCPPPMSVEHADIWVKSYSLYSRERYICN |
| | SGFKRKAGTSSLTECVLNKATNVAHWTTPSLKCIRDPALVHQR |
| | PAPPGGGGSGGGGSPLGLAGGGGGSGGGGSMCMPCFTTDHQM |
| | ARKCDDCCGGKGRGKCYGPQCLCR |
| SEQ ID NO: 1340 | ITCPPPMSVEHADIWVKSYSLYSRERYICNSGFKRKAGTSSLTE |
| | CVLNKATNVAHWTTPSLKCIRDPALVHQRPAPPSGGSGGGGSG |
| | GGSGGGGSLQNWVNVISDLKKIEDLIQSMHIDATLYTESDVH |
| | PSCKVTAMKCFLLELQVISLESGDASIHDTVENLIILANNSLS |
| | SNGNVTESGCKECEELEEKNIKEFLQSFVHIVQMFINTSGSVA |
| | GSMCMPCFTTDHQMARRCDDCCGGRGRGKCYGPQCLCR |
| SEQ ID NO: 1341 | MCMPCFTTDHQMARRCDDCCGGRGRGKCYGPQCLCRGGGGS |
| | VAGGGGSNWVNVISDLKKIEDLIQSMHIDATLYTESDVHPSC |
| | KVTAMKCFLLELQVISLESGDASIHDTVENLIILANNSLSSN |
| | GNVTESGCKECEELEEKNIKEFLQSFVHIVQMFINTSSGGGS |
| | GGGGSGGGGSGGGGSGGGSLQITCPPPMSVEHADIWVKSYSLY |
| | SRERYICNSGFKRKAGTSSLTECVLNKATNVAHWTTPSLKCIR |
| | DPALVHQRPAPP |
| SEQ ID NO: 1343 | ITCPPPMSVEHADIWVKSYSLYSRERYICNSGFKRKAGTSSLTE |
| | CVLNKATNVAHWTTPSLKCIRDPALVHQRPAPPGGSGGGGSG |
| | GGSGGGGSLQNWVNVISDLKKIEDLIQSMHIDATLYTESDVH |
| | PSCKVTAMKCFLLELQVISLESGDASIHDTVENLIILANNSLS |
| | SNGNVTESGCKECEELEEKNIKEFLQSFVHIVQMFINTSGGGGSG |
| | GGGGSVAGGGGSGGGGSMCMPCFTTDHQMARKCDDCCGG |
| | KGRGKCYGPQCLCR |
| SEQ ID NO: 1344 | ITCPPPMSVEHADIWVKSYSLYSRERYICNSGFKRKAGTSSLTE |
| | CVLNKATNVAHWTTPSLKCIRDPALVHQRPAPPGGGSGGGGS |
| | GGGSGGGGSLQNWVNVISDLKKIEDLIQSMHIDATLYTESDV |
| | HPSCKVTAMKCFLLELQVISLESGDASIHDTVENLIILANNS |
| | LSSNGNVTESGCKECEELEEKNIKEFLQSFVHIVQMFINTSGGGGS |
| | GGGGSVAGGGGSGGGGSMCMPCFTTDHQMARKCDDCC |
| | GGKGRGKCYGPQCLCR |
| SEQ ID NO: 1345 | ITCPPPMSVEHADIWVKSYSLYSRERYICNSGFKRKAGTSSLTE |
| | CVLNKATNVAHWTTPSLKCIRDPALVHQRPAPPSGGSGGGGSG |
| | GGSGGGGSLQNWVNVISDLKKIEDLIQSMHIDATLYTESDVH |
| | PSCKVTAMKCFLLELQVISLESGDASIHDTVENLIILANNSLS |
| | SNGNVTESGCKECEELEEKNIKEFLQSFVHIVQMFINTSGGGGS |
| | GGGGSVAGGGGSGGGGSMCMPCFTTDHQMARACDDCCGG |
| | AGRGKCYGPQCLCR |
| SEQ ID NO: 1346 | ITCPPPMSVEHADIWVKSYSLYSRERYICNSGFKRKAGTSSLTE |
| | CVLNKATNVAHWTTPSLKCIRDPALVHQRPAPPSGGSGGGGSG |
| | GGSGGGGSLQNWVNVISDLKKIEDLIQSMHIDATLYTESDVH |
| | PSCKVTAMKCFLLELQVISLESGDASIHDTVENLIILANNSLS |
| | SNGNVTESGCKECEELEEKNIKEFLQSFVHIVQMFINTSGGGGS |
| | GGGGSVAGGGGSGGGGSMCMPCFTTDHQMARRCDDCCGG |
| | RGRGKCYGPQCLCR |
| SEQ ID NO: 1347 | MCMPCFTTDHQMARKCDDCCGGKGRGKCYGPQCLCRGGGGS |
| | VAGGGGSNWVNVISDLKKIEDLIQSMHIDATLYTESDVHPS |
| | CKVTAMKCFLLELQVISLESGDASIHDTVENLIILANNSLSSN |
| | GNVTESGCKECEELEEKNIKEFLQSFVHIVQMFINTSSGGGS |
| | GGGGSGGGGSGGGGSGGGSLQITCPPPMSVEHADIWVKSYSLY |
| | SRERYICNSGFKRKAGTSSLTECVLNKATNVAHWTTPSLKCIR |
| | DPALVHQRPAPP |
| SEQ ID NO: 1348 | MCMPCFTTDHQMARACDDCCGGAGRGKCYGPQCLCRGGGGS |
| | VAGGGGSNWVNVISDLKKIEDLIQSMHIDATLYTESDVHPS |
| | CKVTAMKCFLLELQVISLESGDASIHDTVENLIILANNSLSSN |
| | GNVTESGCKECEELEEKNIKEFLQSFVHIVQMFINTSSGGGS |
| | GGGGSGGGGSGGGGSGGGSLQITCPPPMSVEHADIWVKSYSLY |
| | SRERYICNSGFKRKAGTSSLTECVLNKATNVAHWTTPSLKCIR |
| | DPALVHQRPAPP |
| SEQ ID NO: 1349 | ITCPPPMSVEHADIWVKSYSLYSRERYICNSGFKRKAGTSSLTE |
| | CVLNKATNVAHWTTPSLKCIRDPALVHQRPAPPSGGSGGGGSG |
| | GGSGGGGSLQNWVNVISDLKKIEDLIQSMHIDATLYTESDVH |
| | PSCKVTAMKCFLLELQVISLESGDASIHDTVENLIILANNSLS |
| | SNGNVTESGCKECEELEEKNIKEFLQSFVHIVQMFINTSX₁X₂ |
| | X₃X₄X₅X₆X₇X₈X₉X₁₀X₁₁X₁₂X₁₃X₁₄X₁₅X₁₆X₁₇X₁₈X₁₉X₂₀X₂₁X₂₂X₂₃X₂₄ |
| | X₂₅X₂₆X₂₇X₂₈X₂₉X₃₀X₃₁X₃₂X₃₃X₃₄X₃₅X₃₆X₃₇X₃₈X₃₉X₄₀X₄₁X₄₂X₄₃X₄₄ |
| | X₄₅X₄₆X₄₇X₄₈X₄₉X₅₀MCMPCFTTDHQMARKCDDCCGGKGRGKCY |
| | GPQCLCR |
| SEQ ID NO: 1350 | NWVNVISDLKKIEDLIQSMHIDATLYTESDVHPSCKVTAMK |
| | CFLLELQVISLESGDASIHDTVENLIILANNSLSSNGNVTESG |
| | CKECEELEEKNIKEFLQSFVHIVQMFINTSSGGGSGGGGSGG |
| | GGSGGGGSGGGSLQITCPPPMSVEHADIWVKSYSLYSRERYICN |
| | SGFKRKAGTSSLTECVLNKATNVAHWTTPSLKCIRDPALVHQR |
| | PAPPX₁X₂X₃X₄X₅X₆X₇X₈X₉X₁₀X₁₁X₁₂X₁₃X₁₄X₁₅X₁₆X₁₇X₁₈X₁₉X₂₀X₂₁ |
| | X₂₂X₂₃X₂₄X₂₅X₂₆X₂₇X₂₈X₂₉X₃₀X₃₁X₃₂X₃₃X₃₄X₃₅X₃₆X₃₇X₃₈X₃₉X₄₀X₄₁ |
| | X₄₂X₄₃X₄₄X₄₅X₄₆X₄₇X₄₈X₄₉X₅₀MCMPCFTTDHQMARKCDDCCGG |
| | KGRGKCYGPQCLCR |
| SEQ ID NO: 1351 | ITCPPPMSVEHADIWVKSYSLYSRERYICNSGFKRKAGTSSLTE |
| | CVLNKATNVAHWTTPSLKCIRDPALVHQRPAPPSGGSGGGGSG |
| | GGSGGGGSLQNWVNVISDLKKIEDLIQSMHIDATLYTESDVH |
| | PSCKVTAMKCFLLELQVISLESGDASIHDTVENLIILANNSLS |
| | SNGNVTESGCKECEELEEKNIKEFLQSFVHIVQMFINTSXXX |
| | XXXXXXXXXXXXXXXXXXXXXXXXXMCMPCFTTDHQMAR |
| | KCDDCCGGKGRGKCYGPQCLCR |
| SEQ ID NO: 1352 | NWVNVISDLKKIEDLIQSMHIDATLYTESDVHPSCKVTAMK |
| | CFLLELQVISLESGDASIHDTVENLIILANNSLSSNGNVTESG |
| | CKECEELEEKNIKEFLQSFVHIVQMFINTSSGGGSGGGGSGG |
| | GGSGGGGSGGGSLQITCPPPMSVEHADIWVKSYSLYSRERYICN |
| | SGFKRKAGTSSLTECVLNKATNVAHWTTPSLKCIRDPALVHQR |
| | PAPPXXXXXXXXXXXXXXXXXXXXXXXXXXXXXXMCMPCF |
| | TTDHQMARKCDDCCGGKGRGKCYGPQCLCR |
| SEQ ID NO: 1353 | ITCPPPMSVEHADIWVKSYSLYSRERYICNSGFKRKAGTSSLTE |
| | CVLNKATNVAHWTTPSLKCIRDPALVHQRPAPPSGGSGGGGSG |
| | GGSGGGGSLQNWVNVISDLKKIEDLIQSMHIDATLYTESDVH |
| | PSCKVTAMKCFLLELQVISLESGDASIHDTVENLIILANNSLS |
| | SNGNVTESGCKECEELEEKNIKEFLQSFVHIVQMFINTSX₁X₂ |
| | X₃X₄X₅X₆X₇X₈X₉X₁₀X₁₁X₁₂X₁₃X₁₄X₁₅X₁₆X₁₇X₁₈X₁₉X₂₀X₂₁X₂₂X₂₃X₂₄ |
| | X₂₅X₂₆X₂₇X₂₈X₂₉X₃₀X₃₁X₃₂X₃₃X₃₄X₃₅X₃₆X₃₇X₃₈X₃₉X₄₀X₄₁X₄₂X₄₃X₄₄ |
| | X₄₅X₄₆X₄₇X₄₈X₄₉X₅₀MCMPCFTTDHQMARACDDCCGGAGRGKCY |
| | GPQCLCR |
| SEQ ID NO: 1354 | NWVNVISDLKKIEDLIQSMHIDATLYTESDVHPSCKVTAMK |
| | CFLLELQVISLESGDASIHDTVENLIILANNSLSSNGNVTESG |
| | CKECEELEEKNIKEFLQSFVHIVQMFINTSSGGGSGGGGSGG |
| | GGSGGGGSGGGSLQITCPPPMSVEHADIWVKSYSLYSRERYICN |
| | SGFKRKAGTSSLTECVLNKATNVAHWTTPSLKCIRDPALVHQR |
| | PAPPX₁X₂X₃X₄X₅X₆X₇X₈X₉X₁₀X₁₁X₁₂X₁₃X₁₄X₁₅X₁₆X₁₈X₁₈X₁₉X₂₀X₂₁ |
| | X₂₂X₂₃X₂₄X₂₅X₂₆X₂₇X₂₈X₂₉X₃₀X₃₁X₃₂X₃₃X₃₄X₃₅X₃₆X₃₇X₃₈X₃₉X₄₀X₄₁ |
| | X₄₂X₄₃X₄₄X₄₅X₄₆X₄₇X₄₈X₄₉X₅₀MCMPCFTTDHQMARACDDCCGG |
| | AGRGKCYGPQCLCR |
| SEQ ID NO: 1355 | ITCPPPMSVEHADIWVKSYSLYSRERYICNSGFKRKAGTSSLTE |
| | CVLNKATNVAHWTTPSLKCIRDPALVHQRPAPPSGGSGGGGSG |
| | GGSGGGGSLQNWVNVISDLKKIEDLIQSMHIDATLYTESDVH |
| | PSCKVTAMKCFLLELQVISLESGDASIHDTVENLIILANNSLS |
| | SNGNVTESGCKECEELEEKNIKEFLQSFVHIVQMFINTSX₁X₂ |
| | X₃X₄X₅X₆X₇X₈X₉X₁₀X₁₁X₁₂X₁₃X₁₄X₁₅X₁₆X₁₇X₁₈X₁₉X₂₀X₂₁X₂₂X₂₃X₂₄ |
| | X₂₅X₂₆X₂₇X₂₈X₂₉X₃₀X₃₁X₃₂X₃₃X₃₄X₃₅X₃₆X₃₇X₃₈X₃₉X₄₀X₄₁X₄₂X₄₃X₄₄ |
| | X₄₅X₄₆X₄₇X₄₈X₄₉X₅₀MCMPCFTTDHQMARRCDDCCGGRGRGKCY |
| | GPQCLCR |
| SEQ ID NO: 1356 | NWVNVISDLKKIEDLIQSMHIDATLYTESDVHPSCKVTAMK |
| | CFLLELQVISLESGDASIHDTVENLIILANNSLSSNGNVTESG |
| | CKECEELEEKNIKEFLQSFVHIVQMFINTSSGGGSGGGGSGG |
| | GGSGGGGSGGGSLQITCPPPMSVEHADIWVKSYSLYSRERYICN |
| | SGFKRKAGTSSLTECVLNKATNVAHWTTPSLKCIRDPALVHQR |
| | PAPPX₁X₂X₃X₄X₅X₆X₇X₈X₉X₁₀X₁₁X₁₂X₁₃X₁₄X₁₅X₁₆X₁₇X₁₈X₁₉X₂₀X₂₁ |
| | X₂₂X₂₃X₂₄X₂₅X₂₆X₂₇X₂₈X₂₉X₃₀X₃₁X₃₂X₃₃X₃₄X₃₅X₃₆X₃₇X₃₈X₃₉X₄₀X₄₁ |
| | X₄₂X₄₃X₄₄X₄₅X₄₆X₄₇X₄₈X₄₉X₅₀MCMPCFTTDHQMARRCDDCCGG |
| | RGRGKCYGPQCLCR |
| SEQ ID NO: 1357 | ITCPPPMSVEHADIWVKSYSLYSRERYICNSGFKRKAGTSSLTE |
| | CVLNKATNVAHWTTPSLKCIRDPALVHQRPAPPY₁Y₂Y₃Y₄Y₅Y₆ |
| | Y₇Y₈Y₉Y₁₀Y₁₁Y₁₂Y₁₃Y₁₄Y₁₅Y₁₆Y₁₇Y₁₈Y₁₉Y₂₀Y₂₁Y₂₂Y₂₃Y₂₄Y₂₅Y₂₆Y₂₇ |
| | Y₂₈Y₂₉Y₃₀Y₃₁Y₃₂Y₃₃Y₃₄Y₃₅Y₃₆Y₃₇Y₃₈Y₃₉Y₄₀Y₄Y₄₂Y₄₃Y₄₄Y₄₅Y₄₆Y₄₇ |
| | Y₄₈Y₄₉Y₅₀NWVNVISDLKKIEDLIQSMHIDATLYTESDVHPSCK |
| | VTAMKCFLLELQVISLESGDASIHDTVENLIILANNSLSSNGN |
| | VTESGCKECEELEEKNIKEFLQSFVHIVQMFINTSX₁X₂X₃X₄X₅ |
| | X₆X₇X₈X₉X₁₀X₁₁X₁₂X₁₃X₁₄X₁₅X₁₆X₁₇X₁₈X₁₉X₂₀X₂₁X₂₂X₂₃X₂₄X₂₅X₂₆ |
| | X₂₇X₂₈X₂₉X₃₀X₃₁X₃₂X₃₃X₃₄X₃₅X₃₆X₃₇X₃₈X₃₉X₄₀X₄₁X₄₂X₄₃X₄₄X₄₅X₄₆ |
| | X₄₇X₄₈X₄₉X₅₀MCMPCFTTDHQMARRCDDCCGGRGRGKCYGPQCL |
| | CR |
| SEQ ID NO: 1358 | NWVNVISDLKKIEDLIQSMHIDATLYTESDVHPSCKVTAMK |
| | CFLLELQVISLESGDASIHDTVENLIILANNSLSSNGNVTESG |
| | CKECEELEEKNIKEFLQSFVHIVQMFINTSY₁Y₂Y₃Y₄Y₅Y₆Y₇Y₈ |
| | Y₉Y₁₀Y₁₁Y₁₂Y₁₃Y₁₄Y₁₅Y₁₆Y₁₇Y₁₈Y₁₉Y₂₀Y₂₁Y₂₂Y₂₃Y₂₄Y₂₅Y₂₆Y₂₇Y₂₈Y₂₉ |
| | Y₃₀Y₃₁Y₃₂Y₃₃Y₃₄Y₃₅Y₃₆Y₃₇Y₃₈Y₃₉Y₄₀Y₄Y₄₂Y₄₃Y₄₄Y₄₅Y₄₆Y₄₇Y₄₈Y₄₉ |
| | Y₅₀ITCPPPMSVEHADIWVKSYSLYSRERYICNSGFKRKAGTSSL |
| | TECVLNKATNVAHWTTPSLKCIRDPALVHQRPAPPX₁X₂X₃X₄X₅ |
| | X₆X₇X₈X₉X₁₀X₁₁X₁₂X₁₃X₁₄X₁₅X₁₆X₁₇X₁₈X₁₉X₂₀X₂₁X₂₂X₂₃X₂₄X₂₅X₂₆ |
| | X₂₇X₂₈X₂₉X₃₀X₃₁X₃₂X₃₃X₃₄X₃₅X₃₆X₃₇X₃₈X₃₉X₄₀X₄₁X₄₂X₄₃X₄₄X₄₅X₄₆ |
| | X₄₇X₄₈X₄₉X₅₀MCMPCFTTDHQMARRCDDCCGGRGRGKCYGPQCL |
| | CR |
| SEQ ID NO: 1428 | ITCPPPMSVEHADIWVKSYSLYSRERYICNSGFKRKAGTSSLTE |
| | CVLNKATNVAHWTTPSLKCIRDPALVHQRPAPPSGGSGGGGSG |
| | GGSGGGGSLQNWVNVISDLKKIEDLIQSMHIDATLYTESDVH |
| | PSCKVTAMKCFLLELQVISLESGDASIHDTVENLIILANNSLS |
| | SNGNVTESGCKECEELEEKNIKEFLQSFVHIVQMFINTSGGGGS |
| | GGGGSVAGGGGSGGGGSMCMPCFTTDHQMARRCDDCCGG |
| | RGRGRCYGPQCLCR |
| SEQ ID NO: 1429 | NWVNVISDLKKIEDLIQSMHIDATLYTESDVHPSCKVTAMK |
| | CFLLELQVISLESGDASIHDTVENLIILANNSLSSNGNVTESG |
| | CKECEELEEKNIKEFLQSFVHIVQMFINTSSGGGSGGGGSGG |
| | GGSGGGGSGGGSLQITCPPPMSVEHADIWVKSYSLYSRERYICN |
| | SGFKRKAGTSSLTECVLNKATNVAHWTTPSLKCIRDPALVHQR |
| | PAPPGGGGSGGGGSVAGGGGSGGGGSMCMPCFTTDHQMARR |
| | CDDCCGGRGRGRCYGPQCLCR |
| SEQ ID NO: 1430 | ITCPPPMSVEHADIWVKSYSLYSRERYICNSGFKRKAGTSSLTE |
| | CVLNKATNVAHWTTPSLKCIRDPALVHQRPAPPSGGSGGGGSG |
| | GGSGGGGSLQNWVNVISDLKKIEDLIQSMHIDATLYTESDVH |
| | PSCKVTAMKCFLLELQVISLESGDASIHDTVENLIILANNSLS |
| | SNGNVTESGCKECEELEEKNIKEFLQSFVHIVQMFINTSGSVA |
| | GSMCMPCFTTDHQMARRCDDCCGGRGRGRCYGPQCLCR |
| SEQ ID NO: 1431 | MCMPCFTTDHQMARRCDDCCGGRGRGRCYGPQCLCRGGGGS |
| | VAGGGGSNWVNVISDLKKIEDLIQSMHIDATLYTESDVHPSC |
| | KVTAMKCFLLELQVISLESGDASIHDTVENLIILANNSLSSN |
| | GNVTESGCKECEELEEKNIKEFLQSFVHIVQMFINTSSGGGS |
| | GGGGSGGGGSGGGGSGGGSLQITCPPPMSVEHADIWVKSYSLY |
| | SRERYICNSGFKRKAGTSSLTECVLNKATNVAHWTTPSLKCIR |
| | DPALVHQRPAPP |
| SEQ ID NO: 1434 | ITCPPPMSVEHADIWVKSYSLYSRERYICNSGFKRKAGTSSL |
| IL15RaSushi- | TECVLNKATNVAHWTTPSLKCIRepkscdkthtcppcpapellggpsvflf |
| IgGl-Fc- | ppkpkdtlmisrtpevtcvvvdvshedpevkfnwyvdgvevhnaktkpreeqynstyrvvsv |
| Flexible Linker- | ltvlhqdwlngkeykckvsnkalpapiektiskakgqprepqvytlppsrdeltknqvsltclvk |
| SEQ ID NO: 569 | gfypsdiavewesngqpennykttppvldsdgsfflyskltvdksrwqqgnvfscsvmhealh |
| | nhytqkslslspgkGGGGSGGGGSGGGGSMCMPCFTTDHQMARRCD |
| | DCCGGRGRGKCYGPQCLCR |
| | Two polypeptides having a sequence of SEQ ID NO: 1434 associated |
| | with two polypeptides having a sequence of SEQ ID NO: 1177 |
| | Two polypeptides having a sequence of SEQ ID NO: 1434 associated |
| | with two polypeptides having a sequence of SEQ ID NO: 1178 |
| SEQ ID NO: 1435 | ITCPPPMSVEHADIWVKSYSLYSRERYICNSGFKRKAGTSSL |
| IL15RaSushi- | TECVLNKATNVAHWTTPSLKCIRepkscdkthtcppcpapellggpsvflf |
| IgG1-Fc-CapB | ppkpkdtlmisrtpevtcvvvdvshedpevkfnwyvdgvevhnaktkpreeqynstyrvvsv |
| Linker-SEQ ID | ltvlhqdwlngkeykckvsnkalpapiektiskakgqprepqvytlppsrdeltknqvsltclvk |
| NO: 569 | gfypsdiavewesngqpennykttppvldsdgsfflyskltvdksrwqqgnvfscsvmhealh |
| | nhytqkslslspgkGGGGSGGGGSVAGGGGSGGGGSMCMPCFTTDH |
| | QMARRCDDCCGGRGRGKCYGPQCLCR |
| | Two polypeptides having a sequence of SEQ ID NO: 1435 associated |
| | with two polypeptides having a sequence of SEQ ID NO: 1177 |
| | Two polypeptides having a sequence of SEQ ID NO: 1435 associated |
| | with two polypeptides having a sequence of SEQ ID NO: 1178 |
| SEQ ID NO: 1436 | ITCPPPMSVEHADIWVKSYSLYSRERYICNSGFKRKAGTSSL |
| IL15Ra-IgG1-Fc- | TECVLNKATNVAHWTTPSLKCIRDPALVHQRPAPPSTVTTA |
| Flexible Linker- | GVTPQPESLSPSGKEPAASSPSSNNTAATTAAIVPGSQLMPS |
| SEQ ID NO: 569 | KSPSTGTTEISSHESSHGTPSQTTAKNWELTASASHQPPGVY |
| | PQGHSDTTepkscdkthtcppcpapellggpsvflfppkpkdtlmisrtpevtcvvvdvs |
| | hedpevkfnwyvdgvevhnaktkpreeqynstyrvvsyltvlhqdwlngkeykckvsnkal |
| | papiektiskakgqprepqvytlppsrdeltknqvsltclvkgfypsdiavewesngqpennykt |
| | tppvldsdgsfflyskltvdksrwqqgnvfscsvmhealhnhytqkslslspgkGGGGSG |
| | GGGSGGGGSMCMPCFTTDHQMARRCDDCCGGRGRGKCYGPQC |
| | LCR |
| | Two polypeptides having a sequence of SEQ ID NO: 1436 associated |
| | with two polypeptides having a sequence of SEQ ID NO: 1177 |
| | Two polypeptides having a sequence of SEQ ID NO: 1436 associated |
| | with two polypeptides having a sequence of SEQ ID NO: 1178 |
| SEQ ID NO: 1437 | ITCPPPMSVEHADIWVKSYSLYSRERYICNSGFKRKAGTSSL |
| IL15Ra-IgG1-Fc- | TECVLNKATNVAHWTTPSLKCIRDPALVHQRPAPPSTVTTA |
| CapB Linker-SEQ | GVTPQPESLSPSGKEPAASSPSSNNTAATTAAIVPGSQLMPS |
| ID NO: 569 | KSPSTGTTEISSHESSHGTPSQTTAKNWELTASASHQPPGVY |
| | PQGHSDTTepkscdkthtcppcpapellggpsvflfppkpkdtlmisrtpevtcvvvdvs |
| | hedpevkfnwyvdgvevhnaktkpreeqynstyrvvsyltvlhqdwlngkeykckvsnkal |
| | papiektiskakgqprepqvytlppsrdeltknqvsltclvkgfypsdiavewesngqpennykt |
| | tppvldsdgsfflyskltvdksrwqqgnvfscsvmhealhnhytqkslslspgkGGGGSG |
| | GGGSVAGGGGSGGGGSMCMPCFTTDHQMARRCDDCCGGRGR |
| | GKCYGPQCLCR |
| | Two polypeptides having a sequence of SEQ ID NO: 1437 associated |
| | with two polypeptides having a sequence of SEQ ID NO: 1177 |
| | Two polypeptides having a sequence of SEQ ID NO: 1437 associated |
| | with two polypeptides having a sequence of SEQ ID NO: 1178 |
| SEQ ID NO: 1438 | MCMPCFTTDHQMARRCDDCCGGRGRGKCYGPQCLCRGGGGSG |
| SEQ ID NO: 569- | GGGSGGGGSITCPPPMSVEHADIWVKSYSLYSRERYICNSGF |
| Flexible Linker- | KRKAGTSSLTECVLNKATNVAHWTTPSLKCIRepkscdkthtcppc |
| IL15RaSushi- | papellggpsvflfppkpkdtlmisrtpevtcvvvdvshedpevkfnwyvdgvevhnaktkpr |
| IgG1-Fc | eeqynstyrvvsvltvlhqdwlngkeykckvsnkalpapiektiskakgqprepqvytlppsrd |
| | eltknqvsltclvkgfypsdiavewesngqpennykttppvldsdgsfflyskltvdksrwqqgn |
| | vfscsvmhealhnhytqkslslspgk |
| | Two polypeptides having a sequence of SEQ ID NO: 1438 associated |
| | with two polypeptides having a sequence of SEQ ID NO: 1177 |
| | Two polypeptides having a sequence of SEQ ID NO: 1438 associated |
| | with two polypeptides having a sequence of SEQ ID NO: 1178 |
| SEQ ID NO: 1439 | MCMPCFTTDHQMARRCDDCCGGRGRGKCYGPQCLCRGGGGSG |
| SEQ ID NO: 569- | GGGSVAGGGGSGGGGSITCPPPMSVEHADIWVKSYSLYSRE |
| CapB Linker- | RYICNSGFKRKAGTSSLTECVLNKATNVAHWTTPSLKCIRep |
| IL15RaSushi- | kscdkthtcppcpapellggpsvflfppkpkdtlmisrtpevtcvvvdvshedpevkfnwyvd |
| IgG1-Fc | gvevhnaktkpreeqynstyrvvsvltvlhqdwlngkeykckvsnkalpapiektiskakgqpr |
| | epqvytlppsrdeltknqvsltclvkgfypsdiavewesngqpennykttppvldsdgsfflyskl |
| | tvdksrwqqgnvfscsvmhealhnhytqkslslspgk |
| | Two polypeptides having a sequence of SEQ ID NO: 1439 associated |
| | with two polypeptides having a sequence of SEQ ID NO: 1177 |
| | Two polypeptides having a sequence of SEQ ID NO: 1439 associated |
| | with two polypeptides having a sequence of SEQ ID NO: 1178 |
| SEQ ID NO: 1440 | MCMPCFTTDHQMARRCDDCCGGRGRGKCYGPQCLCRGGGGSG |
| SEQ ID NO: 569- | GGGSGGGGSITCPPPMSVEHADIWVKSYSLYSRERYICNSGF |
| Flexible Linker- | KRKAGTSSLTECVLNKATNVAHWTTPSLKCIRDPALVHQR |
| IL15Ra-IgG1-Fc | PAPPSTVTTAGVTPQPESLSPSGKEPAASSPSSNNTAATTAAI |
| | VPGSQLMPSKSPSTGTTEISSHESSHGTPSQTTAKNWELTAS |
| | ASHQPPGVYPQGHSDTTepkscdkthtcppcpapellggpsvflfppkpkdtlmi |
| | srtpevtcvvvdvshedpevkfnwyvdgvevhnaktkpreeqynstyrvvsyltvlhqdwln |
| | gkeykckvsnkalpapiektiskakgqprepqvytlppsrdeltknqvsltclvkgfypsdiave |
| | wesngqpennykttppvldsdgsfflyskltvdksrwqqgnvfscsvmhealhnhytqkslsls |
| | pgk |
| | Two polypeptides having a sequence of SEQ ID NO: 1440 associated |
| | with two polypeptides having a sequence of SEQ ID NO: 1177 |
| | Two polypeptides having a sequence of SEQ ID NO: 1440 associated |
| | with two polypeptides having a sequence of SEQ ID NO: 1178 |
| SEQ ID NO: 1441 | MCMPCFTTDHQMARRCDDCCGGRGRGKCYGPQCLCRGGGGSG |
| SEQ ID NO: 569- | GGGSVAGGGGSGGGGSITCPPPMSVEHADIWVKSYSLYSRE |
| CapB Linker- | RYICNSGFKRKAGTSSLTECVLNKATNVAHWTTPSLKCIRD |
| IL15Ra-IgG1-Fc | PALVHQRPAPPSTVTTAGVTPQPESLSPSGKEPAASSPSSNN |
| | TAATTAAIVPGSQLMPSKSPSTGTTEISSHESSHGTPSQTTA |
| | KNWELTASASHQPPGVYPQGHSDTTepkscdkthtcppcpapellggps |
| | vflfppkpkdtlmisrtpevtcvvvdvshedpevkfnwyvdgvevhnaktkpreeqynstyry |
| | vsvltvlhqdwlngkeykckvsnkalpapiektiskakgqprepqvytlppsrdeltknqvsltcl |
| | vkgfypsdiavewesngqpennykttppvldsdgsfflyskltvdksrwqqgnvfscsvmhe |
| | alhnhytqkslslspgk |
| | Two polypeptides having a sequence of SEQ ID NO: 1441 associated |
| | with two polypeptides having a sequence of SEQ ID NO: 1177 |
| | Two polypeptides having a sequence of SEQ ID NO: 1441 associated |
| | with two polypeptides having a sequence of SEQ ID NO: 1178 |
| SEQ ID NO: 1173 | MAPRRARGCRTLGLPALLLLLLLRPPATRGDYKDDDDKIEGRI |
| A IL-15 | TCPPPMSVEHADIWVKSYSLYSRERYICNSGFKRKAGTSSLTEC |
| hypergonist fusion | VLNKATNVAHWTTPSLKCIRDPALVHQRPAPPGGSGGGGSGG |
| with a peptide | GSGGGGSLQNWVNVISDLKKIEDLIQSMHIDATLYTESDVHPSC |
| (RLIX; IL-15Ra, a | KVTAMKCFLLELQVISLESGDASIHDTVENLIILANNSLSSNGN |
| linker, IL-15, and | VTESGCKECEELEEKNIKEFLQSFVHIVQMFINTSXXXXXXXXX |
| SEQ ID NO: 568, | XXXXXXXXXXXXXXXXXXXXXXXXXXXXXXXXXXXXXXX |
| see FIG. 3A) | XXMCMPCFTTDHQMARKCDDCCGGKGRGKCYGPQCLCR |
| SEQ ID NO: 1174 | MAPRRARGCRTLGLPALLLLLLLRPPATRGDYKDDDDKIEGRN |
| A IL-15 | WVNVISDLKKIEDLIQSMHIDATLYTESDVHPSCKVTAMKCFL |
| hyperagonist | LELQVISLESGDASIHDTVENLIILANNSLSSNGNVTESGCKECE |
| fusion with a | ELEEKNIKEFLQSFVHIVQMFINTSSGGGSGGGGSGGGGSGGGG |
| peptide (ILRX; IL- | SGGGSLQITCPPPMSVEHADIWVKSYSLYSRERYICNSGFKRKA |
| 15, a linker, IL- | GTSSLTECVLNKATNVAHWTTPSLKCIRDPALVHQRPAPPXXX |
| 15Ra, and SEQ ID | XXXXXXXXXXXXXXXXXXXXXXXXXXXXXXXXXXXXXXX |
| NO: 568, see FIG. | XXXXXXXXMCMPCFTTDHQMARKCDDCCGGKGRGKCYGPQ |
| 4A) | CLCR |
| SEQ ID NO: 1233 | MAPRRARGCRTLGLPALLLLLLLRPPATRGDYKDDDDKIEGRI |
| X any amino acid | TCPPPMSVEHADIWVKSYSLYSRERYICNSGFKRKAGTSSLTEC |
| | VLNKATNVAHWTTPSLKCIRDPALVHQRPAPPGGSGGGGSGG |
| | GSGGGGSLQNWVNVISDLKKIEDLIQSMHIDATLYTESDVHPSC |
| | KVTAMKCFLLELQVISLESGDASIHDTVENLIILANNSLSSNGN |
| | VTESGCKECEELEEKNIKEFLQSFVHIVQMFINTSX₁X₂X₃X₄X₅X₆ |
| | X₇X₈X₉X₁₀X₁₁X₁₂X₁₃X₁₄X₁₅X₁₆X₁₇X₁₈X₁₉X₂₀X₂₁X₂₂X₂₃X₂₄X₂₅X₂₆X₂₇ |
| | X₂₈X₂₉X₃₀X₃₁X₃₂X₃₃X₃₄X₃₅X₃₆X₃₇X₃₈X₃₉X₄₀X₄₁X₄₂X₄₃X₄₄X₄₅X₄₆X₄₇ |
| | X₄₈X₄₉X₅₀MCMPCFTTDHQMARKCDDCCGGKGRGKCYGPQCLC |
| | R |
| SEQ ID NO: 1234 | MAPRRARGCRTLGLPALLLLLLLRPPATRGDYKDDDDKIEGRN |
| X any amino acid | WVNVISDLKKIEDLIQSMHIDATLYTESDVHPSCKVTAMKCFL |
| | LELQVISLESGDASIHDTVENLIILANNSLSSNGNVTESGCKECE |
| | ELEEKNIKEFLQSFVHIVQMFINTSSGGGSGGGGSGGGGSGGGG |
| | SGGGSLQITCPPPMSVEHADIWVKSYSLYSRERYICNSGFKRKA |
| | GTSSLTECVLNKATNVAHWTTPSLKCIRDPALVHQRPAPPX₁X₂ |
| | X₃X₄X₅X₆X₇X₈X₉X₁₀X₁₁X₁₂X₁₃X₁₄X₁₅X₁₆X₁₇X₁₈X₁₉X₂₀X₂₁X₂₂X₂₃X₂₄ |
| | X₂₅X₂₆X₂₇X₂₈X₂₉X₃₀X₃₁X₃₂X₃₃X₃₄X₃₅X₃₆X₃₇X₃₈X₃₉X₄₀X₄₁X₄₂X₄₃X₄₄X₄₅ |
| | X₄₆X₄₇X₄₈X₄₉X₅₀MCMPCFTTDHQMARKCDDCCGGKGRGKCY |
| | GPQCLCR |
| SEQ ID NO: 1503 | MAPRRARGCRTLGLPALLLLLLLRPPATRGDYKDDDDKIEGRI |
| IL-15 hypergonist | TCPPPMSVEHADIWVKSYSLYSRERYICNSGFKRKAGTSSLTEC |
| fusion with CTX | VLNKATNVAHWTTPSLKCIRDPALVHQRPAPPSGGSGGGGSG |
| (an RLIX). | GGSGGGGSLQNWVNVISDLKKIEDLIQSMHIDATLYTESDVHP |
| containing: SEQ | SCKVTAMKCFLLELQVISLESGDASIHDTVENLIILANNSLSSNG |
| ID NO: 1232, SEQ | NVTESGCKECEELEEKNIKEFLQSFVHIVQMFINTSXXXXXXXX |
| ID NO: 1162, SEQ | XXXXXXXXXXXXXXXXXXXXXXXXXXXXXXXXXXXXXXX |
| ID NO: 1176, SEQ | XXXMCMPCFTTDHQMARKCDDCCGGKGRGKCYGPQCLCR |
| ID NO: 1169, SEQ | |
| ID NO: 1177, and | |
| SEQ ID NO: 568 | |
| SEQ ID NO: 1504 | MAPRRARGCRTLGLPALLLLLLLRPPATRGDYKDDDDKIEGRI |
| IL-15 hypergonist | TCPPPMSVEHADIWVKSYSLYSRERYICNSGFKRKAGTSSLTEC |
| fusion with CTX | VLNKATNVAHWTTPSLKCIRDPALVHQRPAPPSGGSGGGGSG |
| (an RLIX). | GGSGGGGSLQNWVNVISDLKKIEDLIQSMHIDATLYTESDVHP |
| Contains SEQ ID | SCKVTAMKCFLLELQVISLESGDASIHDTVENLIILANNSLSSNG |
| NO: 1176, SEQ ID | NVTESGCKECEELEEKNIKEFLQSFVHIVQMFINTSX₁X₂X₃X₄X₅ |
| NO: 1177, SEQ ID | X₆X₇X₈X₉X₁₀X₁₁X₁₂X₁₃X₁₄X₁₅X₁₆X₁₇X₁₈X₁₉X₂₀X₂₁X₂₂X₂₃X₂₄X₂₅X₂₆ |
| NO: 1169, SEQ ID | X₂₇X₂₈X₂₉X₃₀X₃₁X₃₂X₃₃X₃₄X₃₅X₃₆X₃₇X₃₈X₃₉X₄₀X₄₁X₄₂X₄₃X₄₄X₄₅X₄₆ |
| NO: 1232, SEQ ID | X₄₇X₄₈X₄₉X₅₀MCMPCFTTDHQMARKCDDCCGGKGRGKCYGPQC |
| NO: 1162, and | LCR |
| SEQ ID NO: 568 | |

### B. I/Os Comprising 4-1BB Ligands

[0255] In some embodiments, the present disclosure provides an I/O comprising a 4-1BB ligand, where the 4-1BB ligand of the present disclosure may optionally be an agonist, complexed with a peptide of this disclosure. A 4-1BB ligand of the present disclosure can be tumor necrosis factor ligand superfamily member 9, which is also referred to as 4-1BBL, TNFSF9, or TNFL9. A peptide-I/O complex comprising a peptide and a 4-1BB ligand can be referred to herein as a “peptide-4-1BB ligand complex.” The 4-1BB ligand of the present disclosure can be secreted as a trimer, which is the active, receptor binding form of the natural human 4-1BB Ligand (4-1BBL) protein. In some embodiments, a 4-1BB ligand of the present disclosure in the peptide-4-1BB ligand complex can interact with 4-1BB expressed on various immune cells including, but not limited to, CD4+ T cells, CD8+ T cells, Tregs, B cells, NK cells, and myeloid cells (including DCs and osteoclasts). In further aspects, a 4-1BB ligand is fused to a trimerizing domain, such as a collagen C-propeptide of human collagen, or other trimerizing domain. In some embodiments, a 4-1BB ligand of the present disclosure in the peptide-4-1BB ligand complex can interact with 4-1BB expressed in the CNS. 4-1BB ligands can stimulate a Th1 response, including effector CD8+ T cells, NK cells, and DCs and promotes memory, growth, and enhanced effector functions (e.g., tumor cell lysis by effector CD8+ T cells). In some embodiments, 4-1BB ligands can induce cytokines, leukocyte proliferation, tumor inhibition, or any combination thereof. In some embodiments, 4-1BB ligand can inhibit Th2 and Th17 responses and AICD. In some embodiments, 4-1BB ligand can induce tumor regression in a human, non-human primate, or any other animal (Bartkowiak and Curran, Front Oncol 5:117 (2015)).

[0256] In some embodiments, the 4-1BB ligand can be a monoclonal antibody, CDR, or antibody fragment against 4-1BB. In some embodiments, a 4-1BB ligand that is a monoclonal antibody, CDR, or antibody fragment can elicit potent anti-tumor responses. The scFv of an anti-4-1BB monoclonal antibody can be an I/O that can be fused to a peptide of the disclosure. In some embodiments, the 4-1BB ligand can be urelumab or the scFv of urelumab, urelumab CDR, or urelumab antibody fragment. In some embodiments, the 4-1BB ligand is utomilumab or the scFv of utomilumab. Early clinical experience with urelumab and utomilumab has produced promising results including evidence of tumor responses (Chester 2018, Tolcher 2017, Segal 2018). However, there is also significant toxicity associated with these treatments (Atkins 2018, Chester 2018) and this suggests that successful 4-1BB ligand therapy will benefit from tumor targeting using the peptide-I/O complexes described herein.

[0257] Because 4-1BB ligands are active extracellularly, the present disclosure can provide a peptide-I/O complex comprising a peptide-4-1BB ligand complex in which the peptide can home, distribute to, target, migrate to, be processed by, or accumulate in the tumor microenvironment. In some embodiments, the peptide-4-1BB ligand complex can be chemically conjugated or recombinantly expressed as a fusion with a peptide of this disclosure. In some embodiments, the peptide and 4-1BB ligand I/O can be linked with a cleavable linker, such that the linker can be cleaved selectively in the tumor microenvironment, thereby releasing the 4-1BB ligand in high concentrations. Optionally, the peptide-4-1BB ligand complex is a prodrug that can have a lower potency prior to cleavage and a higher potency after cleavage. In some embodiments, the 4-1BB ligand I/O can access intracellular compartments, such as the endosome or lysosome endoplasmic reticulum or Golgi apparatus, due to the cell penetrating properties of the peptide. In such cases, the linker can be acid labile and can be cleaved in the acidic environment of the endosome, or the linker can be enzymatically labile and cleaved by enzymes in the endosome. This can be followed by cytokine recycling to the cell surface or extracellular space. In some embodiments, the 4-1BB ligand can be linked to the peptide by a stable linker and is active, but accumulates at higher levels in the tumor microenvironment because of peptide homing, cell penetration properties, or both. In some embodiments, the 4-1BB ligand can assemble into the endoplasmic reticulum and/or Golgi apparatus compartments, and can be subsequently expressed on the surface.

[0258] In some embodiments, the 4-1BB ligand can be expressed as a fusion protein with a trimerizing domain, such as the C-propeptide of human collagen (Tenascin-C trimerization domain; SEQ ID NO: 1370) (Cui et al. Sci Rep. 2018 May 9;8(1):7327. doi: 10.1038/s41598-018-25652-w.; Berg et al. Cell Death Differ. 2007 December; 14(12):2021-34. Epub 2007 Aug. 17) or collagen alpha-1(XVIII) NCI domain (SEQ ID NO: 1369) (Pan et al. Appl Microbiol Biotechnol. 2013 August; 97(16): 7253-64. doi: 10.1007/s00253-012-4604-0. Epub 2012 Dec. 4.).

[0259] In some embodiments, when the 4-1BB ligand employed is a monoclonal antibody, the 4-1BB ligand can be chemically linked to multiple peptides of the present disclosure. In some embodiments, the 4-1BB ligand can be recombinantly fused to an scFv via a cleavable linker, which can be enzymatically cleaved extracellularly or after internalization during tumor cell processing. In other embodiments, the peptide-4-1BB ligand complex can be co-formulated. In some embodiments, the peptide-4-1BB ligand complex can be formulated in a delivery vehicle, such as a liposome. For example, the 4-1BB ligand can be formulated in a liposome nanoparticle, which can be coated with a peptide of the present disclosure. In other embodiments, a 4-1BB ligand mRNA can be encapsulated in a liposome, which can be further coated with a peptide of the present disclosure. In other embodiments, the 4-1BB ligand can be encoded for by an expression vector. DNA can be encapsulated in a liposome, which can be further coated with a peptide of the present disclosure. In these cases, a promoter can be used in the expression vector such that the 4-1BB ligand is only actively expressed once in cancer cells. In other embodiments, the 4-1BB ligand can be an agonist aptamer (Schrand 2014).

TABLE 5
4-1BB Ligands

| SEQ ID NO | | |
|---|---|---|
| (if | | |
| applica- | | Descrip- |
| ble) | 4-1BB Ligands | tion |
| SEQ ID | QVQLQQWGAGLLKPSETLSLTCAVYGG | urelumab |
| NO: 1225 | SFSGYYWSWIRQSPEKGLEWIGEINHG | heavy |
| | GYVTYNPSLESRVTISVDTSKNQFSLK | chain |
| | LSSVTAADTAVYYCARDYGPGNYDWYF | |
| | DLWGRGTLVTVSSASTKGPSVFPLAPC | |
| | SRSTSESTAALGCLVKDYFPEPVTVSW | |
| | NSGALTSGVHTFPAVLQSSGLYSLSSV | |
| | VTVPSSSLGTKTYTCNVDHKPSNTKVD | |
| | KRVESKYGPPCPPCPAPEFLGGPSVFL | |
| | KFPPKPDTLMISRTPEVTCVVVDVSQE | |
| | DPEVQFNWYVDGVEVHNAKTKPREEQF | |
| | NSTYRVVSVLTVLHQDWLNGKEYKCKV | |
| | SNKGLPSSIEKTISKAKGQPREPQVYT | |
| | LPPSQEEMTKNQVSLTCLVKGFYPSDI | |
| | AVEWESNGQPENNYKTTPPVLDSDGSF | |
| | FLYSRLTVDKSRVVQEGNVFSCSVMHE | |
| | ALHNHYTQKSLSLSLGK | |
| SEQ ID | EIVLTQSPATLSLSPGERATLSCRASQ | Urelumab |
| NO: 1226 | SVSSYLAWYQQKPGQAPRLLIYDASNR | light |
| | ATGIPARFSGSGSGTDFTLTISSLEPE | chain |
| | DFAVYYCQQRSNWPPALTFCGGTKVEI | |
| | KRTVAAPSVFIFPPSDEQLKSGTASVV | |
| | CLLNNFYPREAKVQWKVDNALQSGNSQ | |
| | ESVTEQDSKDSTYSLSSTLTLSKADYE | |
| | KHKVYACEVTHQGLSSPVTKSFNRGEC | |
| SEQ ID | CPWAVSGARASPGSAASPRLREGPELS | TNFSF9 |
| NO: 1227 | PDDPAGLLDLRQGMFAQLVAQNVLLID | |
| | GPLSWYSDPGLAGVSLTGGLSYKEDTK | |
| | ELVVAKAGVYYVFFQLELRRVVAGEGS | |
| | GSVSLALHLQPLRSAAGAAALALTVDL | |
| | PPASSEARNSAFGFQGRLLHLSAGQRL | |
| | GVHLHTEARARHAWQLTQGATVLGLFR | |
| | VTPEIPAGLPSPRSE | |
| SEQ ID | EVQLVQSGAEVKKPGESLRISCKGSGY | Utomilumab |
| NO: 1228 | SFSTYWISWVRQMPGKGLEWMGKIYPG | heavy |
| | DSYTNYSPSFQGQVTISADKSISTAYL | chain |
| | QWSSLKASDTAMYYCARGYGIFDYWGQ | |
| | GTLVTVSSASTKGPSVFPLAPCSRSTS | |
| | ESTAALGCLVKDYFPEPVTVSWNSGAL | |
| | TSGVHTFPAVLQSSGLYSLSSVVTVPS | |
| | SNFGTQTYTCNVDHKPSNTKVDKTVER | |
| | KCCVECPPCPAPPVAGPSVFLFPPKPK | |
| | DTLMISRTPEVTCVVVDVSHEDPEVQF | |
| | NWYVDGVEVHNAKTKPREEQFNSTFRV | |
| | VSVLTWHQDWLNGKEYKCKVSNKGLPA | |
| | PIEKTISKTKGQPREPQVYTLPPSREE | |
| | MTKNQVSLTCLVKGFYPSDIAVEWESN | |
| | GQPENNYKTTPPMLDSDGSFFLYSKLT | |
| | VDKSRWQQGNVFSCSVMHEALHNHYTQ | |
| | KSLSLSPGK | |
| SEQ ID | SYELTQPPSVSVSPGQTASITCSGDNI | utomilumab |
| NO: 1229 | GDQYAHWYQQKPGQSPVLVIYQDKNRP | light |
| | SGIPERFSGSNSGNTATLTISGTQAMD | chain |
| | EADYYCATYTGFGSLAVFGGGTKLTVL | |
| | GQPKAAPSVTLFPPSSEELQANKATLV | |
| | CLISDFYPGAVTVAWKADSSPVKAGVE | |
| | TTTPSKQSNNKYAASSYLSLTPEQWKS | |
| | HRSYSCQVTHEGSTVEKTVAPTECS | |

### C. I/Os Comprising RIG-I Ligands

[0260] In some embodiments, the present disclosure provides an I/O comprising a RIG-I ligand or related ligands, such as MDA5 ligands or TLR3 ligands, complexed with a peptide of this disclosure. A peptide-I/O complex comprising a peptide and a RIG-I ligand can be referred to herein as a “peptide-RIG-I ligand complex.” A peptide-I/O complex comprising a peptide and a MDA5 ligand can be referred to herein as a “peptide-MDA5 ligand complex.” A peptide-I/O complex comprising a peptide and a TLR3 ligand can be referred to herein as a “peptide-TLR3 ligand complex.”

[0261] TLR3 is an endosomal receptor and RIG-I and MDA5 is a cytoplasmic receptors for abnormal double stranded RNAs, comprising a 5′ di or triphosphate (in the case of RIG-I), such as those associated with viral infection. RIG-I and MDA5 ligands can be effective at promoting antitumor immunity and apoptosis in mice (Wu 2017, Yu 2016). RIG-I and MDA5 are both RNA helicases, both have a C terminal domain involved in ligand specificity, and 2 N terminal CARD domains enabling MAVS mediated signal transduction, and both occur in the cytoplasm. Both recognize the internal RNA duplex structure, whereas RIG-I can also recognizes the 5′ terminus of dsRNA (Wu 2013).

[0262] Ligand binding of RIG-I or MDA5 results in the activation of the MAVS dependent signaling pathway leading to the production of proinflammatory substances, including Type I IFNs that lead to antiviral and antitumor immunity (Elion 2018), and are distinct from the gene expression induced by TLR3 activation. Activation of RIG-I or MDA5 can additionally lead to the activation of the inflammasome resulting in changes to the tumor microenvironment that promotes antitumor immunity, such as secretion of IL-1, IL-18, and DAMPS. When poly I:C is transfected to target MDA5 rather than TLR3, it effectively enhances anti-tumor immunity in mice (Bhoopathi 2014). MDA5 and TLR3 recognize similar double stranded RNA ligands not requiring the 5′ triphosphate (Linehan 2018). In particular, MDA5 and TLR3 both recognize poly I:C, but in different cell compartments. In addition to TLR3, other TLRs occur in the endosome that sense dsRNA, including TLR7, 8 and 10. In some embodiments, a RNA ligand can be conjugated to a peptide of this disclosure such that the complex activates RIG-I or MDA5, and in some cases in addition, activates one of the endosomal RNA sensing TLRs. In some cases, only the endosomal TLRs may be triggered or the complex may be specific for one or the other receptors.

[0263] Many organisms that result in human disease have so-called pathogen associated molecular patterns (PAMP) or microbial associated molecular patterns (MAMP), such as nucleic acids, sugars, or lipoproteins that can be detected by a host, such as by binding to pattern recognition receptors (PRRs), and activate innate immune responses, protecting the host from infection. Abnormal RNA is a key pathogen associated molecular pattern (PAMP) from virus infection, leading to the initiation of antiviral immune responses. These RNAs can occur during viral infection, primarily with segmented negative strand viruses. These can include, but are not limited to, the highly pathogenic viruses, influenza, measles, mumps, respiratory syncytial virus (RSV), and parainfluenza, as well as Newcastle Disease Virus, Hanta, Marburg, Ebola, and rabies viruses. These RNAs can also occur upon infection with positive strand RNA viruses including Hepatitis C Virus, Japanese Encephalitis Virus, and also some DNA viruses including adenovirus, vaccinia, and herpes simplex virus. TLR3 recognizes RNA from reovirus, cytomegalovirus, herpes simplex virus, encephalomyocarditis virus (EMCV), flavivirus, and West Nile virus. TLR7 and TLR8, also in endosomes, recognize RNA produced by infection with Sendai virus (SeV), parainfluenza virus (PIV), influenza virus, coxsackie virus, vaccinia virus, measle virus (MV), respiratory syncytial virus (RSV), and retrovirus. TLR10 is another endosomal TLR that recognizes RNA, but less is known about its ligands. MDA5 recognizes dsRNA from EMCV, polio and coxsackie viruses, as well as reoviruses (Chen 2017).

[0264] RIG-I and MDA5 both signal through mitochondrial antiviral-signaling (MAVS) proteins, which initiates signaling via IRF3/7 and NF kappaB factors (Wu 2017). MAVS is also important for initiation, by RLR activation, of tumor cell apoptosis that leads to immunogenic cell death (ICD). Additionally, RIG-I can utilize multiple interferon regulatory factors (IRF). Thus engagement of RIG-I or MDA5 with a RIG-I-specific ligand can activate anti-viral immune mechanisms, which can have therapeutic effects against tumors. In some embodiments, engagement of RIG-I or MDA5 with a RIG-I ligand can induce direct immunogenic cell death (ICD) of tumor cells, but not normal cells. This can result in DC presentation of tumor antigens to the immune system. Engagement of RIG-I or MDA5 by the 5′ triphosphate dsRNA can result in the secretion of pro-inflammatory cytokines Type I interferon (IFN), CXCL10, CCL5, IL-6, IL-23, IL-1B, TNFa, IFNß, and others. In some embodiments, a RIG-I or MDA5 ligand can stimulate DC activation including inflammasome activity. In some embodiments, a RIG-I ligand can induce tumor cells to produce IFN and CXCL10 via the IRF3 pathway. As a result of the diverse immunogenic activity of RIG-I and MDA5 ligands, anti-tumor T cells can be induced. In some embodiments, a RIG-I or mDA5 ligand can induce tumor regression in a subject, such as a human, non-human primate, or any other animal (Bhoopathi 2014, Elion 2018). A RIG-I ligand can additionally inhibit a Th 17 and Treg responses (Yang 2017).

[0265] In some embodiments, I/Os of the instant disclosure can target MDA5, a related cytoplasmic sensor for dsRNA, which shares many of the same functions as RIG-I. Both RIG-I and MDA5 belong to the RNA helicase family, both bind viral dsRNA, and signal via MAVS.

[0266] In some embodiments, the oligonucleotide ligand for RIG-I or other RNA sensors, will also contain sequences that function to regulate expression of specific genes. This could include antisense oligonucleotides (ASO), mRNAs, small interferingRNAs (siRNA), aptamers and microRNAs (miRNA) (Laina 2018) and non coding RNA (ncRNA), and splice correcting oligonucleotides (SCO) (Thierry 2006), and CRISPR-Cas9 system (Majo 2018). Such drugs can regulate translation of specific proteins or they can act to directly inhibit or activate specific protein targets.

[0267] RIG-I ligands can include dsRNA that is short (at least 5-60 base pairs, at least 5-10 base pairs, at least 7-10 base pairs, at least 11-18 base pairs, at least 14-120 base pairs, at least 5-15 base pairs, at least 15-25 base pairs, at least 25-40 base pairs, at least 40-60 base pairs, at least 60-80 base pairs, at least 80-100 base pairs, at least 100-120 base pairs, at least 120-140 base pairs, at least 140-160 base pairs, and, optimally, at least 19-60 base pair with at least one 5′ triphosphate (diphosphate can also be tolerated), and an uncapped 5′A or G, a 5′triphosphate on a blunt end (a Int 5′ overlap, which is a 1 nucleotide overlap at the 5′ end with the triphosphate, is also tolerable, see Hornung et al, Science. 2006 Nov. 10;314(5801):994-7; Schmidt et al, Proc Natl Acad Sci U S A. 2009 Jul. 21; 106(29): 12067-72). At least one 5′ triphosphate or 5′-diphosphate can preferably be located on the 5′-end of the sense strand in the resulting dsRNA. Mismatches can be tolerated within the dsRNA if distal from the 5′triphosphate, for example, if 8 or more base pairs from the 5′ end. This also indicates that other RNA modifications, such as conjugation to a linker and or peptide of this disclosure, may be tolerated distal from the 5′ triphosphate site, such as 8 or more base pairs from the 5′ end. In some aspects, the dsRNA is a hairpin RNA some ribosides of which are paired with a partner within the same hairpin and further comprising a 5′ triphosphate. Short 5′ triphosphate dsRNAs that can be RIG-I ligands include those comprising the polyribonucleotides, as set forth in SEQ ID NO: 1180-SEQ ID NO: 1187, SEQ ID NO: 1203, SEQ ID NO: 1205, and SEQ ID NO: 1193-SEQ ID NO: 1202 (showing hairpin structures that can fold back upon themselves to create dsRNAs), as well as many other sequences that comprise 5′ triphosphate and double stranded (as sense/antisense or as hairpin) RNA as described herein. It is understood that base paired regions of the dsRNA described herein may be paired polyribonucleotides in the context of a longer and/or a single strand of RNA sequence, or in the context of separate polyribonucleotides, that when paired contain the double-stranded portions as described herein.

[0268] Additional sequences are also described in Schlee et al. (Immunity. 2009 Jul. 17;31(1):25-34). Double stranded RNAs (dsRNAs) comprising RIG-I ligands can be made by a variety of techniques that are used to combine the sense and antisense strands of the RNAs into a double stranded form. In some embodiments, the sense and antisense strands of the dsRNA can be separately transcribed or synthesized and combined in to dsRNA structures using a variety of recombinant or synthetic techniques. In other embodiments, the sense and antisense strands of the dsRNA can be transcribed or synthesized in a single RNA that contains a loop structure (hairpin) that is optionally later cleaved by an RNAse to obtain the dsRNA. Loop structures (such as hairpins) can vary in polyribonucleotide length and composition. In some embodiments, a hairpin structure can have a loop structure. In other embodiments, a hairpin structure does not have a loop structure. In some embodiments, a hairpin structure comprises mismatches within the paired dsRNA structure. In some embodiments, short dsRNAs generated by RNase L via cleavage of U-rich cytosolic RNA can be RIG-I ligands. For segmented negative-strand RNA viruses, such RIG-I ligands can be found in “panhandles” formed by base pairing of conserved and complementary 5′ and 3′ genome ends, which can activate RIG-I. A RIG-I ligand corresponding to the Rabies panhandle is shown in SEQ ID NO: 1188 as an example. Some viruses evolved mismatches at the 5′ ends of RNAs in order to evade RIG-I. Influenza virus genome promoters can be contained within their mostly complementary genome ends, and can form 5′ ppp blunt-ended dsRNAs that can activate RIG-I (Anchisi et al. J Virol. 2015 Oct. 7;90(1):586-90), such as those set forth in any one of SEQ ID NO: 1189-SEQ ID NO: 1192. Additional viral panhandle sequences that can serve as RIG-I ligands cam include SEQ ID NO: 1193-SEQ ID NO: 1198. RIG-I ligands described in Lee et al. (Nucleic Acids Res. 2016 Sep. 30;44(17):8407-16), Goldeck et al. (Methods Mol Biol. 2014; 1169:15-25), and Schmidt et al. (Proc Natl Acad Sci USA. 2009 Jul. 21; 106(29): 12067-72) can be additionally used herein as an I/O. As such then, a RIG-I ligand could comprise two RNA strands complexed together as a double strand, comprising 5′ di- or tri-phosphate groups on one or both strands, or it could comprise a single RNA strand complexed together in a hairpin that is double stranded at one or more locations in the molecule. The double strand may extend throughout the sequence or there may be regiosn of mismatch, and there may be one or more locations of hairpin self association within one or both strands. In addition, the ends of the double strand may be at the same blunt location, or one or the other end may overhang. Hairpins and other structures within the RNA complex can be more immunogenic and activate the RIG-I pathway at higher levels. MDA5 ligands may also exhibit all the above structural variations, but may also contain no or one 5′ phosphate. In some embodiments, the RIG-I ligands can be non-nucleic acid benzobisthiazole compounds as shown in FIG. 5 and as described in Probst et al. (Vaccine. 2017 Apr. 4;35(15):1964-1971).

[0269] The RNA backbone or bases of a RIG-I ligand can be modified to improve in vitro and in vivo stability including serum stability, manufacturability, shelf stability, or other properties of the molecule including base pairing affinity and immune system activation. Pyrimidines can be 2′-fluoro-modified (Lee et al, Mol Ther. 2017 Jun. 7;25(6): 1295-1305), which can increase stability to nucleases as well as increase immune system activation. The RNA backbone can be phosphorothioate-substituted (where the non-bridging oxygen is replaced with sulfur), which can increase resistance to nuclease digestion as well as altering the biodistribution and tissue retention and increasing the pharmacokinetics such as by increasing protein binding, and can also induce more immune stimulation. Methyl phosphonate modification of an RNA can also be used. 2′-Omethyl and 2′-F RNA bases can be used, which can protect against base hydrolysis and nucleases and increase the melting temperature of duplexes. The modification can also comprise a bridged nucleic acid, a morpholino nucleic acid, a PNA, an LNA, an ethyl cEt nucleic acid. Bridged, Locked, and other similar forms of Bridged Nucleic Acids (BNA, LNA, cEt) where any chemical bridge such as an N—O linkage between the 2′ oxygen and 4′ carbons in ribose can be incorporated to increase resistance to exo- and endonucleases and enhance biostability. These include Bridged Nucleic Acids (BNA) where an N—O linkage between the 2′ and 4′ carbons occur and where any chemical modification of the nitrogen (including but not limited to N—H, N—CH3, N-benzene) in the bridge can be added to increase stability RNA backbone or base modifications can be placed anywhere in the RNA sequence, at one, multiple, or all base locations. Optionally the modifications may be distal from the end of the dsRNA complex that contains the 5′ triphosphate and interacts with the helicase. The RNA backbone or base modifications may enhance, decrease, or have no effect on the level of RIG-I activation by the peptide-RIG-I ligand complex. Optionally Phosophorothioate nucleic acids may be used at the 2-3 terminal nucleic acids of one or both sequences. Optionally 2′F modified nucleic acids may be used at least at 2-4 positions, at least 5%, at least 10% at least 25% of internal positions, at least 50%, at least 75%, or up to 100% of internal positions, all internal positions or all positions.

[0270] The RIG-I ligand may have additional modified nucleotides or bases present within the sequence, such as to allow chemical modification such as conjugation to a linker and peptide or conjugation to an additional delivery agent such as a lipid, cholesterol, or hydrocarbon chain.

[0271] Because RIG-I is active intracellularly, the present disclosure provides a peptide-RIG-I ligand complex in which the peptide can home, distribute to, target, migrate to, be processed by, or accumulate in the tumor microenvironment, or can be capable of cell penetration such that the RIG-I ligand can access the cytoplasm of the target cell. RIG-I ligands by themselves may be able to activate the RIG-I helicase when in contact with it, but when applied to cells in vivo or in vitro may access the cytoplasm at only low levels and thus not be able to access and activate RIG-I. Without a peptide of this disclosure, RIG-I ligands may require formulation with transfection reagents or other components to access the cytoplasm, which may not be feasible for human cancer therapy, due to toxicity, stability, safety issues, or inability to apply the formulation systemically (such as by intravenous or subcutaneous administration) and deliver sufficient amounts of active agent to the tumor. By combining a peptide of this disclosure with an I/O to create a peptide-I/O complex comprising peptide-RIG-I ligand complex, RIG-I can be activated in vivo for anti-cancer therapy. For example, the RIG-I ligand in the peptide-RIG-I I/O complex can access the cytoplasm of the target cell via cleavage of the peptide-I/O in the endosome or after exit from the endosome into the cytosol and dissociated RIG-I ligand therefrom can access the cytoplasm, or via any other mechanism as described herein. The RIG-I ligand can also optionally access the cytoplasm and RIG-I without cleavage. The peptide-RIG-I ligand complex can be designed such that the peptide is distal from the end of the RIG-I ligand that activates the helicase, and as such the peptide-RIG-I ligand complex may be active without cleavage. The interaction between RIG-I ligands and the RIG-I helicase, such as shown in the crystal structure in Devarker et al., Proc Natl Acad Sci, 113(3): 596-601, 2016, can be analyzed to design peptide-RIG-I ligand complexes. In the peptide-I/O complex, the peptides of this disclosure can be located a number of base pairs away from the 5′ppp end of the RIG-I I/O, such as 3, 4, 5, 6, 7, 8, 9, 10 11, 12, 13, 14, 15, 16, 17, 18, 19, 20 or more base pairs away from the 5′ppp end. In some embodiments, the peptide of this disclosure is conjugated 7-20 base pairs away from the 5′ppp end. In some embodiments, the peptide of this disclosure is conjugated more than 20 base pairs away from the 5′ppp end. In some embodiments, the RIG-I ligand I/O can be chemically conjugated to the peptide. For example, the peptide and RIG-I ligand I/O can be linked with a cleavable linker, such that the linker can be cleaved selectively once intracellular, such as in the endosome or cytosol, thereby releasing the RIG-I ligand adequately in high concentrations within a cell in order to target intracellular RIG-I. The peptide and RIG-I ligand can be linked such that the RIG-I is inactive or blocked from binding to its receptor by the peptide until the peptide is removed, thereby reducing exposure of noncancerous tissues to the I/O. For example, the linker can be a disulfide bond that is cleaved in the reducing environment of the cytosol, the endosomal-lysosomal pathway, on the surface of the cell, or in the tumor microenvironment. In other embodiments, the linker can be acid labile such that the linker is cleaved in the acidic environment of the endosomal-lysosomal pathway. In other embodiments, the linker can be enzymatically cleavable, such that it is cleaved by enzymes in the endosomal-lysosomal pathway, within the cytosol, or within the tumor microenvironment. In other embodiments, the peptide-RIG-I ligand complex can be cleaved as a part of a catabolic pathway. In other embodiments, the peptide-RIG-I ligand complex can be co-formulated. In some embodiments, the peptide-RIG-I ligand complex can be formulated in a delivery vehicle, such as a liposome. In other embodiments, the peptide-RIG-I ligand complex comprises a RIG-I ligand that can be encapsulated in a liposome, which can be further coated with a peptide of the present disclosure. In other embodiments, the peptide-RIG-I ligand complex can be linked by a stable linker and is active as a complex. The linker can comprise additional functions as peptides or chemical structures that enhance endosomal escape, endosomal uptake, tissue biodistribution to the tumor, or cell penetration. Cell penetrating or endosomal escape peptide sequences can be added to the linker or to the other end of the peptide. The linker can comprised hydrophobic domains (as as (CH2)x where x=1-30), cholesterol, LCA, DHA, or DLA, hydrophilic domains (such as hydroxyl groups or oligoethylene glycol), or flexible domains that allow the peptide and RIG-I ligand freedom of movement for interaction with cellular components (such as (CH2-CH2-O)x where x=1-10, 1-30, 20-100, 100-1000).

[0272] Peptides of this disclosure can be cell penetrating, can be endocytosed, pinocytoseed, taken up by cells, and or can access the cytoplasm of cells such as cancer cells. Peptides of this disclosure and some of its variants can bind preferentially to tumor cells by virtue of specificity for Annexin A2, a calcium regulated phospholipid binding protein (Lizarbe 2013) that is involved in endocytic membrane traffic (Morel 2009). Annexin A2 is overexpressed on the surface of cancer cells where it is associated with poor prognosis (Sharma 2018). Annexin A2 is involved in membrane trafficking events including microvesicle formation, vesicle aggregation, phagocytosis, and nucleotide and protein trafficking, and furthermore, has a role in the delivery of papilloma virus to endosomes and the transport of viral DNA to the nucleus via the MVE and TGN (Taylor 2018). Annexin A2 is also involved in the transport of therapeutic oligonucleotides and may facilitate endosomal release (Wang 2016). Given the role of Annexin A2 in DNA delivery and the known transport of chlorotoxin peptides into various endosomal compartments including the TGN (Wiranowska et al., Cancer Cell Intl 11:1-13 (2011)), peptide-RIG-I complexes of this disclosure can facilitate the delivery of RIG-I ligands to the cytoplasm. Likewise, in vivo studies also demonstrate the ability of pacifastin peptides, also known as LCMI-II peptides, THP1 peptides, and chymotrypsin inhibitors, to accumulate in and penetrate the cells of tumors (Sottero et al., Anticancer Research 38:51-60 (2018)), such as the peptides of SEQ ID NO: 1243-SEQ ID NO: 1262.

[0273] In some embodiments, exemplary peptide-I/O complexes of the present disclosure comprising a RIG-I ligand as the I/O are shown in the structures set forth in FIG. 34-FIG. 44 and FIG. 55-FIG. 79. In particular embodiments, a peptide-I/O complex of the present disclosure comprising a RIG-I ligand as the I/O is shown in FIG. 37. In some embodiments, a peptide-I/O complex of the present disclosure comprising a RIG-I ligand comprises a peptide comprising at least 80%, at least 85%, at least 90%, at least 91%, at least 92%, at least 93%, at least 94%, at least 95%, at least 96%, at least 97%, at least 98%, at least 99%, or at least 100% sequence identity to a peptide of SEQ ID NO: 569, comprises a stable linker, and comprises a RIG-ligand of SEQ ID NO: 1371.

[0274] In some embodiments, any one of SEQ ID NO: 1180-SEQ ID NO: 1206 can have at least a triphosphate or diphosphate on the 5′ end of the sense strand. In some embodiments, SEQ ID NO: 1180-SEQ ID NO: 1206 can have one or more 5′ triphosphate or one or more 5′ diphosphate on the 5′ end of the sense strand, the antisense strand, or both. In some embodiments, RIG-I stimulating activity of any one of SEQ ID NO: 1180-SEQ ID NO: 1206 can require the presence of 5′ppp on the sense strand. In other embodiments, any one of SEQ ID NO: 1180-SEQ ID NO: 1206 do not comprise 5′ triphosphates. In some embodiments, incorporation of a 2′fluoropyramidine into any one of the dsRNA sequences can enhance the activation of RIG-I, as discussed in Lee 2016. TABLE 6 below lists exemplary I/Os comprising exemplary RIG-I ligands of the present disclosure. In all sequences set forth in TABLE 6, the 5′ end can comprise a 5′ triphosphate (5′ppp), a, 5′diphosphate (5′pp), a, 5′ monophosphate (5′p), or no phosphate.

TABLE 6
RIG-I Ligands

| SEQ ID NO | | |
|---|---|---|
| (if | | |
| applicable) | RIG-I Ligands | Description |
| SEQ ID NO: | GACACACACACACACACACACUUU | 5'->3' strand of |
| 1180 | | short dsRNA (sense) |
| SEQ ID NO: | CUGUGUGUGUGUGUGUGUGUGAAA | 3'->5' strand of |
| 1181 | | short dsRNA |
| | | (antisense) |
| SEQ ID NO: | AACACACACACACACACACACUUU | 5'->3' strand of |
| 1182 | | short dsRNA (sense) |
| SEQ ID NO: | UUGUGUGUGUGUGUGUGUGUGAAA | 3'->5' strand of |
| 1183 | | short dsRNA |
| | | (antisense) |
| SEQ ID NO: | GACGACGACGACGACGACGACGAC | 5'->3' strand of |
| 1184 | GACGAC | short dsRNA (sense) |
| SEQ ID NO: | CUGCUGCUGCUGCUGCUGCUGCUG | 3'->5' strand of |
| 1185 | CUGCUG | short dsRNA |
| | | (antisense) |
| SEQ ID NO: | GACGCUGACCCUGAAGUUCAUCUU | 5'->3' strand of |
| 1186 | | short dsRNA (sense) |
| SEQ ID NO: | CUGCGACUGGGACUUCAAGUAGAA | 3'->5' strand of |
| 1187 | | short dsRNA |
| | | (antisense) |
| SEQ ID NO: | GACGCUUAACAAAUAAACAACAAA | 5'->3' ssRNA |
| 1188 | AAUGAGAAAAACAAUCAUAUGUCU | resulting in |
| | GUUUUUUCUUUGAUCUGGUUGUUA | hairpin structure |
| | AGCGUC | of short 5' |
| | | triphosphate |
| | | dsRNAs; Rabies |
| | | panhandle |
| | Non-nucleic acid | See FIG. 5 |
| | benzobisthiazole | |
| | compounds | |
| SEQ ID NO: | GGCAAAAGCAGGGAGACAAAGACA | 5'->3' Short dsRNA |
| 1189 | AAAAGGC | Flu genomic |
| | | promoter sequence |
| | | (sense) |
| SEQ ID NO: | CCGUUUUCGUCCCUCUGUUUCUGU | 3'->5' Short dsRNA |
| 1190 | UUUUCCG | Flu genomic |
| | | promoter sequence |
| | | (antisense with |
| | | evolved mismatch) |
| SEQ ID NO: | GGGAGAAACAAGGGCGGCAACAAC | Short dsRNA Flu |
| 1191 | CAACAAA | genomic promoter |
| | | sequence (sense) |
| SEQ ID NO: | CCCUCUUUGUUCCAUUUUAA | Short dsRNA Flu |
| 1192 | | genomic promoter |
| | | sequence (antisense |
| | | with evolved |
| | | mismatch) |
| SEQ ID NO: | aguagaaacaaggguauuuuucuu | 5'->3' ssRNA |
| 1517 | uaauugucguacuccuugauguca | resulting in |
| | cucagugagugauuaucuacccug | hairpin structure |
| | cuuuugcu | of short Flu A |
| | | genome (segment 5; |
| | | NC_002019); see |
| | | FIG. 14 |
| SEQ ID NO: | accaaacaaagauuuggugaauga | 5'->3' ssRNA |
| 1518 | cgagacuacacgccuuuuaucgua | resulting in |
| | acucaccgauucucuguuuggu | hairpin structure |
| | | of short NDV genome |
| | | (NC_002617) 5' end |
| | | sense strand only; |
| | | see FIG. 15 |
| SEQ ID NO: | ACCAGACAAGAGUUUAUCUCUUGU | 5'->3' ssRNA |
| 1195 | UUGGU | resulting in |
| | | hairpin structure |
| | | of short RSV genome |
| | | (NC-001803) |
| SEQ ID NO: | ACCAGACAAGAG | Short region of |
| 1235 | | dsRNA derived from |
| | | a cleaved SEQ ID |
| | | NO: 1195; 5' → 3' |
| | | (sense) |
| SEQ ID NO: | UGGUUUGUUCUC | Short region of |
| 1236 | | dsRNA derived from |
| | | a cleaved SEQ ID |
| | | NO: 1195; 3' → 5' |
| | | (antisense) |
| SEQ ID NO: | GAGCAGAAACAAGGCUUCGGCCUU | ssRNA resulting in |
| 1196 | GUUUCUGCUC | hairpin structure |
| | | of short Flu A |
| | | panhandle sequence |
| | | Lee 2016 supp |
| SEQ ID NO: | GAGCAGAAACAAGGC | Short region of |
| 1237 | | dsRNA derived from |
| | | a cleaved SEQ ID |
| | | NO: 1196 5' → 3' |
| | | (sense) |
| SEQ ID NO: | CUCGUCUUUGUUCCG | Short region of |
| 1238 | | dsRNA derived from |
| | | a cleaved SEQ ID |
| | | NO: 1196 3' → 5' |
| | | (antisense) |
| SEQ ID NO: | GGGACGCUGACCCAGAAGAUCUAC | 5'->3' ssRNA |
| 1197 | UAGAAAUAGUAGAUCUUCUGGGUC | resulting in |
| | AGCGUCCC | hairpin structure |
| | | of short self- |
| | | annealing hairpin |
| | | RNA oligonucleotide |
| | | that forms a strong |
| | | intramolecular |
| | | hairpin structure, |
| | | thus automatically |
| | | forming a dsRNA |
| | | molecule (IVT4) |
| | | Goldeck 2014, also |
| | | shown in FIG. 2 |
| SEQ ID NO: | GGGACGCUGACCCAGAAGAUCUAC | Short region of |
| 1239 | UA | dsRNA derived from |
| | | a cleaved SEQ ID |
| | | NO: 1197 5' → 3' |
| | | (sense) |
| SEQ ID NO: | CCCUGCGACUGGGUCUUCUAGAUG | Short region of |
| 1240 | AU | dsRNA derived from |
| | | a cleaved SEQ ID |
| | | NO: 1197 3' → 5' |
| | | (antisense) |
| SEQ ID NO: | GGCUAGCGACCUCUGUUUGAUCAA | 5'->3' ssRNA |
| 1198 | ACAGAGGUCGCAUGCC | resulting in |
| | | hairpin structure |
| | | of short dsRNA |
| | | (Schmidt 2009) |
| SEQ ID NO: | GGCAUGCGACCUCUGUUU | Short region of |
| 1241 | | dsRNA derived from |
| | | a cleaved SEQ ID |
| | | NO: 1198 5' → 3' |
| | | (sense) |
| SEQ ID NO: | CCGUACGCUGGAGACAAA | Short region of |
| 1242 | | dsRNA derived from |
| | | a cleaved SEQ ID |
| | | NO: 1198 3' → 5' |
| | | (antisense) |
| SEQ ID NO: | GGGAGGACGAUGCGGUACCUGACA | 5'->3' ssRNA |
| 1199 | GCAUCUUGAUAAUGGUCCUACGGA | resulting in |
| | GCCGUUCCAGACGACUCGCCCGA | hairpin structure |
| | | of short dsRNA 10F |
| | | targets |
| | | Melanoma/melanocyte |
| SEQ ID NO: | GGCGCUCCGACCUUAGUCUCUGUG | 5'->3' ssRNA |
| 1200 | CCGCUAUAAUGCACGGAUUUAAUC | resulting in |
| | GCCGUAGAAAAGCAUGUCAAAGCC | hairpin structure |
| | GGAACCGUGUAGCACAGCAGA | of short dsRNA E07 |
| | | targets Epidermal |
| | | growth factor |
| | | receptor |
| SEQ ID NO: | GGGAGGUGGACGAACUGCCCUCAG | 5'->3' ssRNA |
| 1201 | CUACUUUCAUGUUGCUGACGCACA | resulting in |
| | GACGACUCGCUG | hairpin structure |
| | | of short dsRNA |
| | | 9.14T10 targets vWF |
| SEQ ID NO: | GGGAGGUGGACGAACUGCCCUACG | 5'->3' ssRNA |
| 1202 | CACAGACGACUCGCUG | resulting in |
| | | hairpin structure |
| | | of short dsRNA |
| | | 9.14T17 targets vWF |
| SEQ ID NO: | GGAUGCGGUACCUGACAGCAUCC | 5'->3' Short dsRNA |
| 1203 | | RNA-23 (sense) |
| SEQ ID NO: | CCUACGCCAUGGACUGUCGUAGG | 3' -> 5' Short |
| 1204 | | dsRNA RNA-23 |
| | | (antisense) |
| SEQ ID NO: | GGCUAUACUGCGGACUAUUUGGCA | 5'->3' Short dsRNA |
| 1205 | AAGGAAGCAUUGACACAUGCGCCA | RNA-140 sense |
| | AAUUUGCCUGCUCUACCAAGGCAA | (sense) |
| | UAGGAAGAACCAUCUUGAAAGAGA | |
| | AUAUCAAGUACGAAGUGGCCAUUU | |
| | UUGUCCAUGGACCAACUACC | |
| SEQ ID NO: | CCGAUAUGACGCCUGAUAAACCGU | 3' -> 5' Short |
| 1206 | UUCCUUCGUAACUGUGUACGCGGU | dsRNA RNA-140 sense |
| | UUAAACGGACGAGAUGGUUCCGUU | (antisense) |
| | AUCCUUCUUGGUAGAACUUUCUCU | |
| | UAUAGUUCAUGCUUCACCGGUAAA | |
| | AACAGGUACCUGGUUGAUGG | |
| SEQ ID NO: | GCAUGCGACCUCUGUUUGAUCAAA | 5'->3' ssRNA |
| 1371 | CAGAGGUCGCAUGC | resulting in |
| | | hairpin structure |
| | | of short dsRNA |
| SEQ ID NO: | GGCAUGCGACCUCUGUUUGAUCAA | 5'->3' ssRNA |
| 1372 | ACAGAGGUCGCAUGCC | resulting in |
| | | hairpin structure |
| | | of short dsRNA |
| SEQ ID NO: | GGCAUGCGACCUCUGUUUGAUCAG | 5'->3' ssRNA |
| 1373 | AGGU | resulting in |
| | | hairpin structure |
| | | of short dsRNA |
| SEQ ID NO: | GGCAUGCGACCUCUGUUUGAGGUC | 5'->3' ssRNA |
| 1374 | GCAUG | resulting in |
| | | hairpin structure |
| | | of short dsRNA |
| SEQ ID NO: | GGACGUACGUUUCGACGUACGUCC | 5'->3' ssRNA |
| 1375 | | resulting in |
| | | hairpin structure |
| | | of short dsRNA |
| SEQ ID NO: | GGAUCGAUCGAUCGUUCGCGAUCG | 5'->3' ssRNA |
| 1376 | AUCGAUCC | resulting in |
| | | hairpin structure |
| | | of short dsRNA |
| SEQ ID NO: | AACACACACACACACACACACUUU | 5'->3' ssRNA |
| 1377 | GUGUGUGUGUGUGUGUGUGUU | resulting in |
| | | hairpin structure |
| | | of short dsRNA |
| SEQ ID NO: | AACACACACACACACACACACUUU | 5'->3' ssRNA |
| 1378 | AAGUGUGUGUGUGUGUGUGUGUU | resulting in |
| | | hairpin structure |
| | | of short dsRNA |
| SEQ ID NO: | GGACGUACGUUUCGCGACUGUAGA | 5'->3' ssRNA |
| 1379 | UUAAUCUACAGUCGCGAAACGUAC | resulting in |
| | GUCC | hairpin structure |
| | | of short dsRNA |
| SEQ ID NO: | 5'GGAUCGAUCGAUCGUU | 5'->3' Short dsRNA |
| 1380 | | RNA-16 (sense) |
| SEQ ID NO: | 3'CCUAGCUAGCUAGCGC | 5'->3' Short dsRNA |
| 1381 | | RNA-16 (antisense) |
| SEQ ID NO: | 5'GCAUGCGACCUCUGUUUGA | 5'->3' Short dsRNA |
| 1424 | | RNA-19 (sense) |
| SEQ ID NO: | 3' CGUACGCUGGAGACAAACU | 5'->3' Short dsRNA |
| 1425 | | RNA-19 (antisense) |
| SEQ ID NO: | 5' GGACGUACGUUUCGCGA | 5'->3' Short dsRNA |
| 1426 | CUGUAGA | RNA-24 (sense) |
| SEQ ID NO: | 3'-CCUGCAUGCAAAGCGCU | 5'->3' Short dsRNA |
| 1427 | GACAUCU | RNA-24 (antisense) |

### D. I/Os Comprising Stimulator of Interferon Genes Protein (STING) Ligands

[0275] In some embodiments, the present disclosure provides an I/O comprising a STING ligand, for example an agonist, complexed with a peptide of this disclosure. A peptide-I/O complex comprising a peptide and a STING ligand, such as a STING ligand acting as an agonist on its target can be referred to herein as a “peptide-STING ligand complex”. STING is a key component of innate immunity to viral infections and can regulate Type I IFN production in response to cytosolic dsDNA (a viral signal). STING can react to cyclic dinucleotides (e.g. 2′,3′-cGAMP as disclosed in Kato et al. (J Interferon Cytokine Res. 2017 May; 37(5):207-213)), which can be produced by the cytoplasmic enzyme cGAS (a pattern recognition receptor (PRR)). STING is a protein that can be present in the cytoplasm, associated with the ER, and can be a key regulator of the production of proinflammatory cytokines, such as Type I IFN, in response to infection of the cell by virus that release dsDNA. The presence of dsDNA in the cytoplasm can stimulate cGAS to catalyze synthesis of a cyclic dinucleotide (CDN). This molecule, termed 2′3′-cGAMP, can bind to STING with a much greater affinity than cGAMP molecules comprising other combinations of phosphodiester linkages, as described by Kato et al. (J Interferon Cytokine Res. 2017 May; 37(5):207-213). 2′,3′-cGAMP can trigger STING to activate IRF3 and NF-KB signaling. 2′,3′-cGAMP can be a physiological ligand for STING, although other cyclic dinucleotides are also active. FIG. 7 illustrates said STING ligands that can be complexed as an I/O with any peptide of the present disclosure, as provided by Kato et al. (J Interferon Cytokine Res. 2017 May; 37(5):207-213)). STING is located in association with the perinuclear endoplasmic reticulum (ER) and can translocate to the Golgi apparatus upon activation. In some embodiments, STING ligands can have synergy with an anti-PDL1 checkpoint inhibitor. In some embodiments, STING ligands promote effector CD8+ T cell-mediated anti-tumor activity. In some embodiments, a synergy and a promotion of T-cell mediated anti-tumor activity can be due to indirect activity of STING ligands, such as via interferon secretion. Intratumoral cyclic dinucleotides, of which 2′3′-cGAMP is a highly potent STING ligand, can be effective in inducing tumor regression. In some embodiments, STING ligands can trigger IRF3 and NFKB, resulting in production of Type I IFN and other pro-inflammatory cytokines by tumor cells and inflammasome assembly (including IL-1/IL-18 secretion). In some embodiments, STING ligands can promote tumor-specific effector T cell responses by activating interferon secretion and costimulatory ligand expression by myeloid cells after DC uptake of tumor cell-derived DNA. STING ligands have potent antitumor activity in mouse models of cancer, and several potent human STING ligands have advanced to clinical trials (Vargas et al, Eur J Cancer 75:86-97 (2017)). STING may also be stimulated indirectly by stimulating cGAS to produce cGAMP. cGAMP detects dsDNA in the cytoplasm in a length dependent manner. cGAS responds best to short (20 bp) or dsDNA of 50 bp or longer, derived from bacterial or viral patrhogens as well as mtDNA in the cytoplasm. cGAS ligands include sstDNA, which is a single stranded stem loop structure such as occurs during HIV infection, such as:

(SEQ ID NO: 1513)
CAGACGGGCACACACTACTTGAAGCACTCAAGGCAAGCTTTATTGAGGCT
TAAGCAGTGGGTTCCCTAGT
or
(SEQ ID NO: 1514)
CAGGGGGGACCACTCTTAAGCCTCAAGGCAAGCTTTGTTGAGGCTTAAGA
GTGGTCCCGGGT
or
(SEQ ID NO: 1515)
CAGGGGGGCACACACTACTTGAAGCACTCAAGGCAAGCTTTGTTGAGGCT
TAAGCAGTGGGTTCCCGGGT
(Herzner 2015).

[0276] Cyclic dinucleotides (CDNs) are STING ligands that can have poor therapeutic efficacy due to their inability to access intracellular compartments, similarly to RIG-I and MDA5 ligands. Formulations of CDNs can facilitate the activation of antitumor immune responses in mouse models (Fu et al., Sci Transl Med. 2015 Apr. 15;7(283):283ra52) and can have poor cell membrane permeability and metabolic instability, which in turn, can limit their applicability in medicine. Accordingly, medicinal chemistry efforts have been made to produce novel CDNs that are resistant to the degradation of cellular ecto-nucleotide pyropho-sphatase/phosphodiesterase (ENPP1) (Li et al. (Nat Chem Biol. 2015 September; 11(9):741) and Lioux et al. (J Med Chem. 2016 Nov. 23;59(22): 10253-10267)). In some embodiments, the CDNs disclosed in Li et al. (Nat Chem Biol. 2015 September; 11(9):741) and Lioux et al. (J Med Chem. 2016 Nov. 23;59(22): 10253-10267) can be used as an I/O with any peptide of the present disclosure. Delivery of CDNs with nanoparticles or liposomes can improve their antitumor activity in vivo (Hanson et al., J Clin Invest. 2015 June; 125(6):2532-46). Additionally, a single S162A substitution in human STING can confer DMXAA sensitivity (Gao et al. Cell. 2013 Aug. 15;154(4):748-62). In some embodiments, STING ligands of the present disclosure can be DMXAA analogs as disclosed in Gao et al. (Cell. 2013 Aug. 15;154(4): 748-62). G10, or 4-(2-chloro-6-fluorobenzyl)-N-(furan-2-ylmethyl)-3-oxo-3,4-dihydro-2H-benzo[b][1,4]thiazine-6-car-boxamide can be a STING-specific agonist I/O of the instant disclosure can induce an antiviral response in human fibroblasts against alphaviruses (Sali et al. (PLOS Pathog. 2015 Dec. 8;11(12):e1005324)). In some embodiments, G10, or 4-(2-chloro-6-fluorobenzyl)-N-(furan-2-ylmethyl)-3-oxo-3,4-dihydro-2H-benzo[b][1,4]thiazine-6-car-boxamide can be a STING ligand, as disclosed in Sali et al. (PLOS Pathog. 2015 Dec. 8;11(12):e1005324). In some embodiments, STING ligands of the present disclosure can be hydrolysis resistant analogs developed with phosphothioate linkages as disclosed in Li et al. (Nat Chem Biol. 2015 September; 11(9):741). For example, the enzyme ecto-nucleotide pyrophosphatase/phosphodiesterase (ENPP1) can be a dominant 2′3′-cGAMP hydrolase in cells, tissue extracts, and in blood, as reported by Li et al. (Nat Chem Biol. 2015 September;11(9):741). These linkages can be used in place of either or both of the 2′-5′ and the 3′-5′ phosphodiester linkages (2′3′-cGSASMP). Doubly substituted analog can be both active and resistant to hydrolysis. FIG. 8 illustrates exemplary CDNs that can be complexed as an I/O with any peptide of the present disclosure, as provided by Li et al. (Nat Chem Biol. 2015 September;11(9):741). In some embodiments, a STING ligand of the present disclosure can comprise one adenosine nucleoside and one inosine nucleoside (cAIMP) as set forth in Lioux et al. (J Med Chem. 2016 Nov. 23;59(22):10253-10267). Analogs can be varied by sugar (ribose, 2′-deoxyribose, or 2′-fluoro-2′-deoxyribose), by inter-nucleotide linkage position (2′,2′; 2′,3′; 3′,3′; or 3′,2′), by phosphate modification (bis-phosphodiester or bis-phosphor-othioate), or combination thereof. FIG. 9 illustrates exemplary CDNs that can be complexed as an I/O with any peptide of the present disclosure, as provided by Lioux et al. (J Med Chem. 2016 Nov. 23;59(22):10253-10267). In some embodiments, a STING ligand of the present disclosure can be dispiro diketopiperzine (DSDP), as set forth in Liu et al. (Antiviral Res. 2017 November; 147:37-46). FIG. 10 illustrates an exemplary DSDP STING ligand that can be complexed as an I/O with any peptide of the present disclosure, as provided by Liu et al. (Antiviral Res. 2017 November; 147:37-46). In some embodiments, a STING ligand of the present disclosure can be a synthetic analog of cGAMP, as set forth in U.S. Pat. No. 9,724,408, incorporated herein by reference. FIG. 11 illustrates exemplary synthetic analogs of cGAMP that can be complexed as an I/O with any peptide of the present disclosure, as provided in U.S. Pat. No. 9,724,408.

[0277] Analogs of cAIMP, varying by sugar (ribose, 2′-deoxyribose, or 2′-fluoro-2′-deoxyribose) and by inter-nucleotide linkage position (2′,2′; 2′,3′; 3′,3′; or 3′,2′) and phosphate modification (bis-phosphodiester or bis-phosphorothioate) have been tested in the above listed papers and patents. TABLE 7, from Lioux et al. (J Med Chem. 2016 Nov. 23;59(22): 10253-10267), shows where sugar variations occur in the tested compound also shown in FIG. 9.

TABLE 7

| Compound | Linkage | X1 | X2 | Z |
|---|---|---|---|---|
| 9: 3′,3′c-AIMP | 3′,3′ | OH | OH | O |
| 10: 2′,3′c-AIMP | 2′,3′ | OH | OH | O |
| 23: 3′,2′c-AIMP | 3′,2′ | OH | OH | O |
| 27: 2′,2′c-AIMP | 2′,2′ | OH | OH | O |
| 13: cAIM(PS)₂ | 3′,3′ | OH | OH | S |
| 51: c-(dAMP-dIMP) | 3′,3′ | H | H | O |
| 52: c-(2′FdAMP-2′FdIMP) | 3′,3′ | F | F | O |
| 53: c-[2′FdAMP(S)-2′FdIMP(S)] | 3′,3′ | F | F | S |
| 54: c-(2′FdAMP-dIMP) | 3′,3′ | H | F | O |
| 55: c-(dAMP-2′FdIMP) | 3′,3′ | F | H | O |
| 56) c-[2′FdAM(PS)-dIM(PS)] | 3′,3′ | F | H | S |

[0278] All of the above analogs can be I/Os that agonize STING. Analogs 9, 10, 23, 51, 54, and 55 are equivalent in activity to 2′,3′-cGAMP and analogs 13, 52, 53, 56 can be more potent than 2′,3′-cGAMP.

[0279] Because STING is active intracellularly, the present disclosure provides a peptide-STING ligand complex in which the peptide can home, distribute to, target, migrate to, be processed by, or accumulate in the tumor microenvironment, or can be capable of cell penetration. In some embodiments, the peptide can continue to traffic through intracellular compartments, including the endosome or lysosome, and reach the transgolgi region where STING can reside. In some embodiments, the peptide-STING ligand complex can be chemically conjugated to a peptide of this disclosure. For example, a peptide and STING ligand I/O can be linked with a cleavable linker, such that the linker is cleaved selectively once intracellular, thereby releasing the STING ligand in high concentrations in order to target intracellular STING. The linker can be a disulfide linkage that can be cleaved by the reducing environment of the cytosol or the reducing environment of the endosomal/lysosomal pathway, can be enzymatically cleavable and cleaved by enzymes in the cytosol or in the endosoal/lysosomal pathway, or can be acid labile such that the linker can be cleaved in the acidic environment of the endosomal-lysosomal pathway. In some embodiments, the peptide-STING ligand complex can be linked by a stable linker. In some embodiments, the peptide-STING ligand complex can be active as a complex or can be catabolized into active metabolites. In other embodiments, the peptide-STING ligand complex can be co-formulated. In some embodiments, the peptide-STING ligand complex can be formulated in a delivery vehicle, such as a liposome. In other embodiments, a STING ligand can be encapsulated in a liposome, which can be further coated with a peptide of the present disclosure.

TABLE 8
STING Ligands
Description

Cyclic dinucleotides
3′,3′-cGAMP (see FIG. 8 for structure)
2′,3′-cGAMP (see FIG. 8 for structure)
3′,3′c-diGMP
3′,3′c-diAMP
3′,3′c-AIMP
3′,3′-cGG
3′,3′-cAA
2′,3′-cdGAMP (see FIG. 8 for structure)
2′3′-cG^{s}AMP (see FIG. 8 for structure)
2′3′-cGA^{s}MP (see FIG. 8 for structure)
2′3′-cG^{s}A^{s}MP (see FIG. 8 for structure)
Synthetic analog of 3′,3′c-AIMP
DMXAA analogs
4-(2-chloro-6-fluorobenzy1)-N-(furan-2-ylmethyl)-
3-oxo-3,4-dihydro-2H-benzo[b][1,4]thiazine-6-car-
boxamide
hydrolysis resistant analogs developed with
phophothioate linkages
Synthetic analog of 2′,3′c-GAMP
dispiro diketopiperzine (DSDP)
synthetic analog of cGAMP
3′,3′ c-AIMP (see TABLE 7)
2′,3′c-AIMP (see TABLE 7)
3′,2′c-AIMP (see TABLE 7)
2′,2′c-AIMP (see TABLE 7)
cAIM(PS)₂ (see TABLE 7)
c-(dAMP-dIMP) (see TABLE 7)
c-(2′FdAMP-2′FdIMP) (see TABLE 7)
c-[2′FdAMP(S)-2′FdIMP(S)](see TABLE 7)
c-(2′FdAMP-dIMP) (see TABLE 7)
c-(dAMP-2′FdIMP) (see TABLE 7)
c-[2′FdAM(PS)-dIM(PS)](see TABLE 7)
2,7,2″,2″-dispiro[indene-1″,3″-dione]-
tetrahydrodithiazolo[3,2-a:3′,2′-d]pyrazine-
5,10(5aH, 10aH)-dione
ML-RS-52-CDA
ML-RR-S2-CDA
Disodium dithio-(RP, RP)-[cyclic[A(2′,5′)
pA(3′,5′)p]]
(also referred to as STINGVAX; Fu et al,
Sci Transl Med 7:283ra52 (2015)))
Flavone acetic acid (FAA)
CAGACGGGCACACACTACTTGAAGCACTCAAGGCAAGCTTTATT
GAGGCTTAAGCAGTGGGTTCCCTAGT (SEQ ID NO: 1513;
cGAS ligand that can indirectly stimulate STING)
CAGGGGGGACCACTCTTAAGCCTCAAGGCAAGCTTTGTTGAGGC
TTAAGAGTGGTCCCGGGT (SEQ ID NO: 1514;
cGAS ligand that can indirectly stimulate STING)
CAGGGGGGCACACACTACTTGAAGCACTCAAGGCAAGCTTTGTTGA
GGCTTAAGCAGTGGGTTCCCGGGT (SEQ ID NO: 1515;
cGAS ligand that can indirectly stimulate STING)

### E. I/Os Comprising MDA5, TLR, or RLR Ligands

[0280] In some embodiments, the present disclosure provides an I/O comprising an MDA5 ligand, a TLR ligand, or an RLR ligand, complexed with a peptide of this disclosure. In some embodiments, any of the foregoing ligands are acting as an agonist. A peptide-I/O complex comprising a peptide and an MDA5 ligand can be referred to herein as a “peptide-MDA5 ligand complex.” A peptide-I/O complex comprising a peptide and a TLR ligand can be referred to herein as a “peptide-TLR ligand complex.” A peptide-I/O complex comprising a peptide and a RLR ligand can be referred to herein as a “peptide-RLR ligand complex.”

[0281] RIG-I and MDA5 are related cytoplasmic sensor proteins. Both are RNA helicases and have a C terminal domain involved in ligand specificity and two N terminal CARD domains enabling MAVS mediated signal transduction. Both can recognize the dsRNA duplex structure, however, RIG-I can also recognizes the phosphate groups at the 5′ terminus of some dsRNAs (Wu 2013). MDA5 can recognize double stranded RNA, like poly I:C, but unlike RIG-I, MDA5 does not require a 5′ triphosphate, a 5′ cap of ribose 2′-( )methylation, or both. TABLE 6 above also lists exemplary I/Os comprising exemplary MDA5 ligands of the present disclosure, wherein the sequences do not contain a 5′ triphosphate (5′ppp), a, 5′diphosphate (5′pp), a, 5′ monophosphate (5′p), or 5′ cap of ribose 2′-( )methylation, or any one or more of the foregoing. In some embodiments, an MDA5 ligand lacks a 5′triposohate or lack a 5′ cap of ribose 2′-( )methylation, or both. Poly I:C is also a ligand for TLR3 and, thus, is a TLR3 I/O. TLR3 can function as an endosomal sensor for double stranded RNA. Ligand binding of RIG-I or MDA5 can result in activation of the MAVS dependent signaling pathway, leading to the production of proinflammatory substances, including Type I IFNs that lead to antiviral and antitumor immunity (Elion 2018), which can be distinct from the gene expression induced by TLR3 activation. Activation of RIG-I or MDA5 can also lead the activation of the inflammasome resulting in changes to the tumor microenvironment that promotes antitumor immunity, such as secretion of IL-1, IL-18, and DAMPS. When poly I:C is transfected to target MDA5 rather than TLR3, it can effectively enhance anti-tumor immunity in mice (Bhoopathi 2014). In addition to TLR3, other TLRs, including TLR7, TLR8 and TLR10, occur in the endosome and lysosome that sense dsRNA, ssRNA, and RNA degradation products (Miyake 2018). TLR9, which is also present in the endosome, can recognize unmethylated CpG oligodeoxynucleotides. TLR7 and TLR8 bind small molecule ligands that function as agonists, such as resiquimod (R-848) and imiquimod synthetic imidazoquinoline compounds, which are used for topical treatment of papilloma virus warts. Motolimod, a small molecule TLR8 agonist, can also be used in cancer therapy (Ferris 2018, Dang 2018). In some embodiments, the present disclosure provides an I/O comprising a ligand of the endolysosomal TLR family and said TLR ligand can be complexed with a peptide of this disclosure to form a peptide-TLR ligand complex. Such peptide-TLR ligand complexes may act as agonists of the TLR.

[0282] Other RNA and DNA sensing TLRs can also occur in endosomes, likely due to the common use of endocytosis in viral infection pathways. Targeting of endocytic pathways by peptide-I/O complexes of this disclosure, such as those having an I/O comprising an MDA5 ligand I/O (peptide-MDA5 ligand complex) or TLR I/O (peptide-TLR ligand I/O) can be used to activate these TLR pathways.

[0283] In some embodiments, the present disclosure provides an RLR ligand that activates both an RLR and a TLR, as an I/O to be complexed with a peptide of this disclosure. Endosomal entry of peptide-I/O complexes disclosed herein enables targeting of the endosome resident TLR. Additionally, the ability to promote endosomal release of peptide-nucleic acid conjugates can enable cytoplasmic RLR targeting. An RLR ligand as an I/O in a peptide peptide-I/O complex disclosed herein can target an RLR as well as one or more TLRs by a single drug which can significantly enhance signaling and response of the peptide-I/O complexes. Enhanced immune responses can occur due to the combination of modulating or activating distinct signaling pathways utilized by TLR and RLR, including the MAVS dependent signaling pathways mediated by cytoplasmic RLR and the TRIF/TICAM and MyD88 dependent signaling pathways mediated by the endosomal TLR (Matsumoto 2017). The combination of modulating or activating multiple signaling pathways can recruit additional immune effector cells and amplify the anti-tumor immune response. These nucleic acid ligands, such as TLR ligands and RLR ligandsalso promote antiviral responses including apoptosis and induction of immunity. The same antiviral immune system mechanisms when activated or stimulated are also effective in eliminating tumor cells by acting as an I/O in a peptide-I/O complex of the disclosure. In some embodiments, an RNA ligand acting as an I/O in the peptide-I/O complex of the disclosure activates RIG-I or MDA5, or an endosomal, RNA sensing TLR or RLR. In some cases, only the endosomal TLRs will be triggered. The molecular designs of the peptide-MDA5 I/O ligands of this disclosure can include any design element as described herein (e.g., for RIG-I), such as linker elements that may be stable, cleavable, hydrophobic or hydrophilic, RNA length and modifications, and cell penetrating modifications for, cytosolic delivery, and endosomal uptake or endosomal escape peptides.

[0284] RIG-I can recognize short, greater than or equal to 10 base pairs (Schmidt 2009), 5′-di or triphosphate dsRNAs with blunt 5′ end and unmodified nucleotides most efficiently, independently of the RNA sequence (Uchikawa 2016). MDA5 recognizes dsRNA and is thought to bind the stem, rather than the end, and does not require specific RNA end structures (Wu 2012). MDA5 will bind 12mer dsRNA, and 15mers have been shown to stimulate ATP hydrolysis. As the RNA length grows, MDA5 filamentous oligomers are formed that have enhanced activity. Poly (I:C) without 5′ triphosphate may activate MDA5, if 15-39 base pairs long it may activate MDA5 but not TLR3. TLR3 is also responsive to poly (I:C), preferably at least 40 base pairs long.

### Conjugations, Fusions, and Processing

[0285] A peptide according to the present disclosure can be conjugated or fused to a peptide biological agent or other agent comprising amino acids (e.g., an antibody or antibody fragment, receptor or receptor fragment, ligand or ligand fragment, hormone or hormone fragment, growth factors and growth factor fragments, biological toxins and fragments thereof, or other active portion of a peptide) for use in the treatment of tumors. A peptide-I/O complex can be a peptide conjugated to an I/O by any mechanism described herein. For example, a peptide can be covalently conjugated to an I/O to form a peptide-I/O complex. A peptide can be chemically conjugated to an I/O to form a peptide-I/O complex. A peptide can also be noncovalently complexed by associated with an I/O or other portions of a molecule to bring the two agents together. A peptide and I/O can be expressed as a fusion protein to form a peptide-I/O fusion protein. For example, an antibody or fragment thereof or a cytokine and a peptide can be expressed as a fusion protein to form a peptide-I/O fusion protein. For example, in certain embodiments, a peptide as described herein can be fused to another molecule, such as an I/O that provides an anti-cancer activity. A peptide can be fused with an I/O through expression of a vector containing the sequence of the peptide with the sequence of the I/O. In various embodiments, the sequence of the peptide and the sequence of the I/O are expressed from the same Open Reading Frame (ORF). In various embodiments, the sequence of the peptide and the sequence of the I/O can comprise a contiguous sequence. Various vectors and recombinant systems known in the art can be employed to make such fusion peptides. The peptide and the I/O can each retain similar functional capabilities in the fusion peptide compared with their functional capabilities when expressed separately. In some embodiments, the I/O can be inactive or less active until it is cleaved, processed, or dissociated from the peptide of the peptide-I/O complex. Upon cleavage, processing, and/or dissocation from the peptide of the peptide-I/O complex, the active or more active drug may be referred to herein as the “cleaved I/O.” Cleavage, processing, and/or dissociation of the I/O from the peptide-I/O complex can occur in the tumor microenvironment or intracellularly. In further aspects, the peptide-I/O complex is joined by a cleavable linker that is cleaved by low pH, reducing agents, glutathione, a protease, an enzyme, or is hydrolytically labile, thereby generating the cleaved I/O. In some aspects, the I/O portion of the cleaved I/O is chemically modified as compared to the I/O conjugated to the peptide. In other aspects, the I/O portion of cleaved I/O is not chemically modified as compared to the I/O conjugated to the peptide. In some aspects, the cleaved I/O has a different potency or activity after cleavage than the I/O within the peptide-I/O complex before cleavage. Similarly the activity of the peptide may be modified or degraded upon cleavage, processing or dissociation with the I/O in the tumor microenvironment or intracellularly. For example, the peptide in the peptide-I/O complex may be cleaved, removed, degraded, processed or dissociated by enzymes or chemically within the endosomes, lysosome, or after delivery to the cytoplasm. Cleavage could occur within the linker or within the peptide of this disclosure or within the I/O agent or at any location in the peptide-I/O complex. The peptide and I/O can also be complexed by formulation, such as in and/or on liposomes or nanoparticles.

### Linkers

[0286] A peptide according to the present disclosure that homes, targets, migrates to, is retained by, accumulates in, penetrates, and/or binds to, is processed by, or is directed to the tumor or that penetrates or enters tumor cells can be attached to another moiety (e.g., an any I/O or any other active agent of the present disclosure), such as a small molecule, a second peptide, a protein, a cytokine, a cytokine-receptor chain complex, an antibody, an antibody fragment, an aptamer, polypeptide, polynucleotide, a double stranded (ds) DNA or RNA, a single stranded DNA or RNA, a microRNA, a siRNA, a panhandle RNA, a hairpin RNA, a cyclic dinucleotide, a fluorophore, a radioisotope, a radionuclide chelator, a polymer, a biopolymer, a fatty acid, an acyl adduct, a chemical linker, or sugar or other I/O or other active agent described herein through a linker, or directly in the absence of a linker.

[0287] A peptide can be directly attached to another molecule by a covalent attachment. For example, the peptide can be attached to a terminus of the amino acid sequence of a larger polypeptide or peptide molecule, or is attached to a side chain, such as the side chain of a lysine, serine, threonine, cysteine, tyrosine, aspartic acid, a non-natural amino acid residue, or glutamic acid residue. The peptide can also be attached to a polynucleotide, such as at the 3′ end, the 5′ end, or on one of the residues within the sequence, including a modified nucleotide base with a chemical handle such as an amine or sulfhydryl group. The peptide can also be attached to a cyclic dinucleotide, such as to a nitrogen, oxygen, carbon, or sulfur atom of the cyclic dinucleotide. The attachment can be via an amide bond, an ester bond, a thioester bond, a phosphoester bond, a phosphodiester bond, dithioanalogs of phosphodiester bonds, an ether bond, a carbamate bond, a carbonate bond,, a carbon-nitrogen bond, a triazole, a macrocycle, an oxime bond, a hydrazone bond, a carbon-carbon single double or triple bond, a disulfide bond, or a thioether bond. The attachment can also be via a noncovalent complex or a reversible covalent bond, such as a phenylboronic acid complex with a cis-diol, or by ionic or hydrophobic interactions. In some embodiments, similar regions of the disclosed peptide(s) itself (such as a terminus of the amino acid sequence, an amino acid side chain, such as the side chain of a lysine, serine, threonine, cysteine, tyrosine, aspartic acid, a non-natural amino acid residue, or glutamic acid residue, via an amide bond, an ester bond, a thioester bond, a phosphoester bond, a phosphodiester bond, dithioanalogs of phosphodiester bonds, an ether bond, a carbamate bond, a carbonate bond, a carbon-nitrogen bond, a triazole, a macrocycle, an oxime bond, a hydrazone bond, a carbon-carbon single double or triple bond, a disulfide bond, a thioether bond, a noncovalent or reversible covalent linker, or any other linker as described herein) can be used to link other molecules or to link to any I/O described herein.

[0288] Attachment via a linker can involve incorporation of a linker moiety between the other molecule and the peptide. The peptide and the other molecule can both be covalently attached to the linker. The linker can be cleavable, stable, self-immolating, hydrophilic, or hydrophobic. A cleavable linker can cleave over seconds, minutes, hours, days, or weeks. A stable linker can never be cleaved, or can be cleaved very slowly, or can be degraded via catabolismthe linker can have at least two functional groups with one bonded to the peptide, the other bonded to the other molecule, and a linking portion between the two functional groups.

[0289] Non-limiting examples of the functional groups for attachment can include functional groups capable of forming an amide bond, an ester bond, a thioester bond, a phosphoester bond, a phosphodiester bond, dithioanalogs of phosphodiester bonds, an ether bond, a carbonate bond, a carbamate bond, a carbon-nitrogen bond, a triazole, a macrocycle, an oxime bond, a hydrazone bond, a carbon-carbon single, double, or triple bond, a disulfide bond, or a thioether bond. Non-limiting examples of functional groups capable of forming such bonds can include amino groups; carboxyl groups; hydroxyl groups; aldehyde groups; azide groups; alkyne and alkene groups; ketones; hydrazides; acid halides such as acid fluorides, chlorides, bromides, and iodides; acid anhydrides, including symmetrical, mixed, and cyclic anhydrides; carbonates; carbonyl functionalities bonded to leaving groups such as cyano, succinimidyl, and N-hydroxysuccinimidyl; maleimides; linkers containing maleimide groups that are designed to hydrolyze; maleimidocaproyl; MCC ([N-maleimidomethyl]cyclohexane-1-carboxylate); N-ethylmaleimide; maleimide alkane; mc-vc-PABC; DUBA (DuocarmycinhydroxyBenzamide-Azaindole linker); SMCC Succinimidyl-4-(N-maleimidomethyl) cyclohexane-1-carboxylate; SPDP (N-succinimidyl-3-(2-pyridyldithio) propionate); SPDB N-succinimidyl-4-(2-pyridyldithio) butanoate; sulfo-SPDB N-succinimidyl-4-(2-pyridyldithio)-2-sulfo butanoate; SPP N-succinimidyl 4-(2-pyridyldithio)pentanoate; a dithiopyridylmaleimide (DTM); a hydroxylamine, a vinyl-halo group; haloacetamido groups; bromoacetamido; hydroxyl groups; sulfhydryl groups; and molecules possessing, for example, alkyl, alkenyl, alkynyl, allylic, or benzylic leaving groups, such as halides, mesylates, tosylates, triflates, epoxides, phosphate esters, sulfate esters, and besylates.

[0290] Non-limiting examples of the linking portion can include alkylene, alkenylene, alkynylene, polyether, such as polyethylene glycol (PEG), hydroxy carboxylic acids, oligoethylene glycol, polyester, polyamide, polyamino acids, zwitterionic polypeptide, polypeptide, polypeptide comprising G and S such as GGGS (SEQ ID NO: 1170), GGGSGGGS (SEQ ID NO: 1171), (GGGS)x (SEQ ID NO: 1172) where x=1-10, polypeptides comprising Pro, Ala, and Ser, cleavable peptides, valine-citrulline (Val-Cit) (SEQ ID NO: 1142), Phe-Lys (SEQ ID NO: 1143), Val-Lys (SEQ ID NO: 1140), Val-Ala (SEQ ID NO: 1139), Val-Lys (SEQ ID NO: 1140), Val-Arg (SEQ ID NO: 1141), Met-Lys (SEQ ID NO: 1144), Asn-Lys (SEQ ID NO: 1145), Ile-Pro (SEQ ID NO: 1146), Gly-Ile (SEQ ID NO: 1147), Gly-Leu (SEQ ID NO: 1148), Gly-Tyr (SEQ ID NO: 1149), Met-Ile (SEQ ID NO: 1151), Ala-Ile (SEQ ID NO: 1152), Pro-Ile (SEQ ID NO: 1153), Glu-Glu, Glu-Gly, Gly-Phe-Leu-Gly (SEQ ID NO: 1497), any peptides of SEQ ID NO: 1139-SEQ ID NO: 1161, SEQ ID NO: 1360-SEQ ID NO: 1363 and SEQ ID NO: 1365 other peptide linkers as given in Doronina et al., 2008, a linker cleavable by glucuronidases, such as beta glucuronidase, a linker cleavable by a cathepsin or by cathepsin B, D, E, H, L, S, C, K, O, F, V, X, or W, a linker cleavable by matrix metalloproteases such as MMP-1, 2, 7, 9, or 13, a linker cleavable by hyaluronidase, Val-Cit-p-aminobenzyloxycarbonyl, glucuronide-MABC, aminobenzylcarbamates, D-amino acids, and polyamine, any of which being unsubstituted or substituted with any number of substituents, such as halogens, hydroxyl groups, sulfhydryl groups, amino groups, nitro groups, nitroso groups, cyano groups, azido groups, sulfoxide groups, sulfone groups, sulfonamide groups, carboxyl groups, carboxaldehyde groups, imine groups, alkyl groups, halo-alkyl groups, alkenyl groups, halo-alkenyl groups, alkynyl groups, halo-alkynyl groups, alkoxy groups, aryl groups, aryloxy groups, aralkyl groups, arylalkoxy groups, heterocyclyl groups, acyl groups, acyloxy groups, carbamate groups, amide groups, urethane groups, epoxides, charged groups, zwitterionic groups, and ester groups. Other non-limiting examples of reactions to link molecules together include click chemistry, copper-free click chemistry, HIPS ligation, Staudinger ligation, and hydrazine-iso-Pictet-Spengler.

[0291] A peptide and I/O can be conjugated via a linker can be described with the formula Peptide-A-B-C. A can be a stable amide link to an amine or carboxylic acid on the peptide and the linker, and can be achieved via a tetrafluorophenyl (TFP) ester, an NHS ester, or an ATT group (thiazolidine-thione). A can be a stable carbamate linker such as that formed by reacting an amine on the peptide with an imidazole carbamate active intermediate formed by reaction of CDI with a hydroxyl on the linker. A can be a stable secondary amine linkage such as that formed by reductive alkylation of the amine on the peptide with an aldehyde or ketone group on the linker. A can be a stable thioether linker formed using a maleimide or bromoacetamide in the linker with a thiol in the peptide, a triazole linker, a stable oxime linker, or a oxacarboline linker. B can comprise (-CH2-)x-, with or without branching a short PEG (—CH₂CH₂O—)ₓ (x is 1-20), or a short polypeptide such as GGGSGGGS (SEQ ID NO: 1171), Val-Ala (SEQ ID NO: 1139), Val-Cit (SEQ ID NO: 1142), Val-Cit-PABC, Gly-Ile (SEQ ID NO: 1147), Gly-Leu (SEQ ID NO: 1148), other spacers, or no spacer. C can be a disulfide bond, an amide bond, carbamate, a carbon-carbon single double or triple bond, or an ester bond to a thiol, an amine, a hydroxyl, or carboxylic acid on the I/O. C can be a thioether formed between a maleimide on the linker and a sulfhydroyl on the I/O, a secondary or tertiary amine, a carbamate, or other stable bond. In some embodiments, C can refer to the “cleavable” or “stable” part of the linker. In other embodiments, A and/or B can also be the “cleavable” or stable part. In some embodiments, A can be amide, carbamate, thioether via maleimide or bromoacetamide, triazole, oxime, or oxacarboline. Any linker chemistry described in “Current ADC Linker Chemistry,” Jain et al., Pharm Res, 2015 DOI 10.1007/s1 1095-015-1657-7 or in Bioconjugate Techniques, 3rd edition, by Greg Hermanson can be used.

[0292] In some embodiments, a peptide conjugate can have stable linkers. A peptide of the disclosure can be expressed recombinantly or chemically synthesized. The peptide can be conjugated to a detectable agent, active agent, or an I/O via a stable linker, such as an amide linkage or a carbamate linkage. The peptide can be conjugated to a detectable agent, active agent, or an I/O via a stable linker, such as an amide bond using standard 1-ethyl-3-(3-dimethylaminopropyl)carbodiimide (EDC) or dicylcohexylcarbodiimide (DCC) based chemistry, or thionyl chloride or phosphorous chloride-based bioconjugation chemistries.

[0293] The resulting peptide conjugate can be administered to a human or animal subcutaneously, intravenously, intramuscularly, interdermally, orally, or injected or applied directly into a tumor or tumor microenvironment (intratumorally) or organ to treat disease. The peptide can or may not be specifically cleaved from the detectable agent, active agent, or the I/O via a targeted mechanism. The peptide can be degraded by mechanisms such as catabolismreleasing a drug that is modified or not modified from its “native” or initial form (Antibody-Drug Conjugates: Design, Formulation, and Physicochemical Stability, Singh, Luisi, and Pak. Pharm Res (2015) 32:3541-3571). The peptide drug conjugate exerts its pharmacological activity while still intact, or while partially or fully degraded, metabolized, or catabolized. The peptide conjugate can be designed such that the I/O is only active after cleavage or is more active after cleavage, or the peptide conjugate can be designed such that the I/O is active while conjugated to the peptide.

[0294] The rate of cleavage around a cleavable bond can be varied by varying the local environment around the bond, including carbon length (-CH2-)x, steric hindrance or lack thereof (including adjacent side groups such as methyl, ethyl, cyclic as well as adjacent spacers such as peptidic spacers, which can comprise amino acids such as G, A, or S), hydrophilicity(such as adding hydroxyl, carboxylic acid, or oligoethylene glycol groups), or hydrophobicity (such as adding fluorines, hydrocarbon groups, or fatty tails), adding electron withdrawing or electron donating groups. In some embodiments, cleavage rate can be affected by local pH.

[0295] Cleavage can occur by different mechanisms and at different locations in the body or in the cell. Cleavage can occur at higher rates in lower pH environments, such as the lower pH in an endosome, a lysosome, or diseased tissues such as tumors. Some linkages cleavable by lower pHs include esters, carbamates, carbonates, hydrazones, oximes, and reversible covalent complexes between phenylboronic acids and cis-diols. Cleavage can occur due to reducing environments or disulfide exchange. The cytosol, endosomes, lysosomes, tumor microenvironments, and the cell surface can all be reducing or provide agents (such as glutathione, albumin, or cysteine residues) for disulfide exchange. Cleavage can occur enzymatically, such as by esterases, cathepsins, matrix metalloproteinases, pepsinogen, gelatinase, elastase, trypsin, plasminogen activators, gluuronidases, or hyaluronidase. In some embodiments, the cleavable linker may be cleaved only, or preferentially, upon delivery to a tumor microenvironment, a tumor cell surface, a cellular cytoplasm, or an intracellular compartment such as an endosome or lysosome. These enzymes can be present at higher levels in the tumor microenvironment, on the cell surface, in the endosomal-lysosomal pathway, or in the cytosol. A self-immolating group such as pABC can be included to cause release of a free unmodified drug upon cleavage (Antibody-Drug Conjugates: Design, Formulation, and Physicochemical Stability, Singh, Luisi, and Pak. Pharm Res (2015) 32:3541-3571). The rate of cleavage of the linker can be tuned according to the residency time of the conjugate or peptide-I/O complex in the tumor. For example, when a peptide or peptide-I/O complex is cleared from the tumor relatively quickly, the linker can be tuned to rapidly cleave. In contrast, for example, when a peptide or peptide-I/O complex has a longer residence time in the tumor, a slower cleavage rate can allow for extended delivery of an I/O. This can be important when the peptide or peptide-I/O complex is used to deliver a drug or I/O to the tumor.

[0296] Non-limiting examples of linkers include:

[chemical structure]

wherein each n is independently 0 to about 1,000; 1 to about 1,000; 0 to about 500; 1 to about 500; 0 to about 250; 1 to about 250; 0 to about 200; 1 to about 200; 0 to about 150; 1 to about 150; 0 to about 100; 1 to about 100; 0 to about 50; 1 to about 50; 0 to about 40; 1 to about 40; 0 to about 30; 1 to about 30; 0 to about 25; 1 to about 25; 0 to about 20; 1 to about 20; 0 to about 15; 1 to about 15; 0 to about 10; 1 to about 10; 0 to about 5; or 1 to about 5. In some embodiments, each n is independently 0, about 1, about 2, about 3, about 4, about 5, about 6, about 7, about 8, about 9, about 10, about 11, about 12, about 13, about 14, about 15, about 16, about 17, about 18, about 19, about 20, about 21, about 22, about 23, about 24, about 25, about 26, about 27, about 28, about 29, about 30, about 31, about 32, about 33, about 34, about 35, about 36, about 37, about 38, about 39, about 40, about 41, about 42, about 43, about 44, about 45, about 46, about 47, about 48, about 49, about 50, or any linker as disclosed in Jain, N., Pharm Res. 32(11): 3526-40 (2015) or Ducry, L., Antibody Drug Conjugates (2013). In some embodiments, m is 1 to about 1,000; 1 to about 500; 1 to about 250; 1 to about 200; 1 to about 150; 1 to about 100; 1 to about 50; 1 to about 40; 1 to about 30; 1 to about 25; 1 to about 20; 1 to about 15; 1 to about 10; or 1 to about 5. In some embodiments, m is 0, about 1, about 2, about 3, about 4, about 5, about 6, about 7, about 8, about 9, about 10, about 11, about 12, about 13, about 14, about 15, about 16, about 17, about 18, about 19, about 20, about 21, about 22, about 23, about 24, about 25, about 26, about 27, about 28, about 29, about 30, about 31, about 32, about 33, about 34, about 35, about 36, about 37, about 38, about 39, about 40, about 41, about 42, about 43, about 44, about 45, about 46, about 47, about 48, about 49, or about 50.

[0297] In some embodiments, the linker can release the I/O in an unmodified form. In other embodiments, the I/O can be released with chemical modification. In still other embodiments, catabolismcan release the I/O still linked to parts of the linker and/or peptide.

[0298] A cleavable linker can release an I/O from the peptide. For example, an I/O in a conjugate form with the peptide (i.e., a peptide-I/O complex) may not be initially active, but upon release from the conjugate after targeting to the tumor, the I/O can become active, such as by binding the peptide to the 5′ triphosphate region of an RNA or other parts of the I/O that are essential for function. This can reduce side-effects from I/Os in parts of the body that are not the tumor. Alternatively, a stable linker can still permit release of an active cleavage product after catabolismin a cell. The I/O can alternatively be active when it is still conjugated to the peptide in a peptide-I/O complex, or the peptide can serve to increase the local concentration of the I/O within the tumor microenvironment, on the cell surface, or in the cytosol

[0299] In some embodiments, a peptide can be conjugated to an I/O by common techniques known in the art, such those described in Bioconjugate Techniques by Greg T. Hermanson (2013).

[0300] The choice of linker can be made based on the target for an I/O of this disclosure. For example, cleavable disulfide linkages can be utilized when the I/O is being targeted to an endosomal/lysosomal pathway or the cytoplasm, in which the linker can be reduced. Cleavable hydrazone or ester linkages or boronic acid diol complexes can be utilized when the I/O is being targeted to an endosomal/lysosomal pathway or the tumor microenvironment in general, where the linker can cleaved as a result of low pH. Linkers can also be enzyme cleavable (e.g., by cathepsins or MMPs) wherein the I/O is being targeted to an endosomal/lysosomal pathway, extracellular cell surfaces, the tumor microenvironment in general, or the cytoplasm.

[0301] In addition, the peptide-I/O complex can be designed with different ratios. For example, the I/O can have multiple peptides complexed to it. For example, multiple peptides can be fused with an IL-15 hyperagonist in a chain at the N- or C-terminus with spacer(s) in between or at multiple locations of the agonist. In another example, multiple I/Os can be complexed with one peptide, such as on the N-terminus and a Lys residue of the peptide. Various ratios of I/O and peptide can also be achieved by formulation. For example, in some embodiments the I/O to peptide ratio in a peptide-I/O complex can be from 0.05:1 to 20:1.

### Peptide Stability

[0302] A peptide of the present disclosure can be stable in various biological conditions. For example, any peptide of SEQ ID NO: 1-SEQ ID NO: 1134, SEQ ID NO: 1243-SEQ ID NO: 1262, or SEQ ID NO: 1263-SEQ ID NO: 1316 can exhibit resistance to reducing agents, proteases, oxidative conditions, or acidic conditions.

[0303] In some cases, biologic molecules (such as peptides and proteins) can provide therapeutic functions, but such therapeutic functions are decreased or impeded by instability caused by the in vivo environment. (Moroz et al. Adv Drug Deliv Rev 101:108-21 (2016), Mitragotri et al. Nat Rev Drug Discov 13(9):655-72 (2014), Bruno et al. Ther Deliv (11):1443-67 (2013), Sinha et al. Crit Rev Ther Drug Carrier Syst. 24(1):63-92 (2007), Hamman et al. BioDrugs 19(3): 165-77 (2005)). For instance, the GI tract can contain a region of low pH (e.g. pH˜1), a reducing environment, or a protease-rich environment that can degrade peptides and proteins. Proteolytic activity in other areas of the body, such as the mouth, eye, lung, intranasal cavity, joint, skin, vaginal tract, mucous membranes, tumor tissue, and serum, can also be an obstacle to the delivery of functionally active peptides and polypeptides. Additionally, the half-life of peptides in serum can be very short, in part due to proteases, such that the peptide can be degraded too quickly to have a lasting therapeutic effect when administering reasonable dosing regimens. Likewise, proteolytic activity in cellular compartments such as lysosomes, endosomes, or Golgi apparatus, and reduction activity in lysosomes, endosomes, or Golgi apparatus and the cytosol can degrade peptides and proteins such that they may be unable to provide a therapeutic function on intracellular targets. Therefore, peptides that are resistant to reducing agents, proteases, and low pH may be able to provide enhanced therapeutic effects or enhance the therapeutic efficacy of co-formulated or conjugated I/O in vivo.

[0304] Additionally, oral delivery of drugs can be desirable in order to target certain areas of the body (e.g., disease in the GI tract such as colon cancer) despite the obstacles to the delivery of functionally active peptides and polypeptides presented by this method of administration. Oral delivery of drugs can increase compliance by providing a dosage form that is more convenient for patients to take as compared to parenteral delivery. Oral delivery can be useful in treatment regimens that have a large therapeutic window. Therefore, peptides that are resistant to reducing agents, proteases, and low pH can allow for oral delivery of peptides without nullifying their therapeutic function. For example, certain small molecule I/Os (e.g., STING ligands or RIG-I ligand I/Os acting as STING or RIG-I agonist) can be improved by conjugation to any peptide of the present disclosure (to make a peptide-I/O complex) and are, thus, optimized for oral delivery.

[0305] Peptide Resistance to Reducing Agents. In some embodiments, a peptide of the present disclosure can be reduction resistant. Peptides of this disclosure can contain one or more cysteines, which can participate in disulfide bridges that can be integral to preserving the folded state of the peptide. Exposure of peptides to biological environments with reducing agents can result in unfolding of the peptide and loss of functionality and bioactivity. For example, glutathione (GSH) is a reducing agent that can be present in many areas of the body and in cells, and can reduce disulfide bonds. As another example, a peptide can become reduced upon cellular internalization during trafficking of a peptide across the gastrointestinal epithelium after oral administration A peptide can become reduced upon exposure to various parts of the GI tract. The GI tract can be a reducing environment, which can inhibit the ability of therapeutic molecules with disulfide bonds to have optimal therapeutic efficacy, due to reduction of the disulfide bonds. A peptide can also be reduced upon entry into a cell, such as after internalization by endosomes or lysosomes or into the cytosol, or other cellular compartments. Reduction of the disulfide bonds and unfolding of the peptide can lead to loss of functionality or affect key pharmacokinetic parameters such as bioavailability, peak plasma concentration, bioactivity, and half-life. Reduction of the disulfide bonds can also lead to increased susceptibility of the peptide to subsequent degradation by proteases, resulting in rapid loss of intact peptide after administration. In some embodiments, a peptide that is resistant to reduction can remain intact and can impart a functional activity for a longer period of time in various compartments of the body and in cells, as compared to a peptide that is more readily reduced.

[0306] In certain embodiments, the peptides of this disclosure can be analyzed for the characteristic of resistance to reducing agents to identify stable peptides. In some embodiments, the peptides of this disclosure can remain intact after being exposed to different molarities of reducing agents such as 0.00001M-0.0001M, 0.0001M-0.001M, 0.001M-0.01M, 0.01 M-0.05 M, 0.05 M-0.1 M, for greater 15 minutes or more. In some embodiments, the reducing agent used to determine peptide stability can be dithiothreitol (DTT), Tris(2-carboxyethyl)phosphine HCl (TCEP), 2-Mercaptoethanol, (reduced) glutathione (GSH), or any combination thereof. In some embodiments, at least 5%-10%, at least 10%-20%, at least 20%-30%, at least 30%-40%, at least 40%-50%, at least 50%-60%, at least 60%-70%, at least 70%-80%, at least 80%-90%, or at least 90%-100% of the peptide remains intact after exposure to a reducing agent.

[0307] Peptide Resistance to Proteases. In some embodiments, a peptide of the present disclosure can be resistant to protease degradation. The stability of peptides of this disclosure can be determined by resistance to degradation by proteases. Proteases, also referred to as peptidases or proteinases, can be enzymes that can degrade peptides and proteins by breaking bonds between adjacent amino acids. Families of proteases with specificity for targeting specific amino acids can include serine proteases, cysteine proteases, threonine proteases, aspartic proteases, glutamic proteases, esterases, serum proteases, and asparagine proteases. Additionally, metalloproteases, matrix metalloproteases, elastase, carboxypeptidases, Cytochrome P450 enzymes, and cathepsins can also digest peptides and proteins. Proteases can be present at high concentration in blood, in mucous membranes, lungs, skin, the GI tract, the mouth, nose, eye, and in compartments of the cell. Misregulation of proteases can also be present in various diseases such as rheumatoid arthritis and other immune disorders and cancer. Degradation by proteases can reduce bioavailability, biodistribution, half-life, and bioactivity of therapeutic molecules such that they are unable to perform their therapeutic function. In some embodiments, peptides that are resistant to proteases can better provide therapeutic activity at reasonably tolerated concentrations in vivo.

[0308] In some embodiments, peptides of this disclosure can resist degradation by any class of protease. In certain embodiments, peptides of this disclosure resist degradation by pepsin (which can be found in the stomach), trypsin (which can be found in the duodenum), serum proteases, or any combination thereof. In certain embodiments, peptides of this disclosure can resist degradation by lung proteases (e.g., serine, cysteinyl, and aspartyl proteases, metalloproteases, neutrophil elastase, alpha-1 antitrypsin, secretory leucoprotease inhibitor, elafin), or any combination thereof. In some embodiments, the proteases used to determine peptide stability can be pepsin, trypsin, chymotrypsin, or any combination thereof. In some embodiments, at least 5%-10%, at least 10%-20%, at least 20%-30%, at least 30%-40%, at least 40%-50%, at least 50%-60%, at least 60%-70%, at least 70%-80%, at least 80%-90%, or at least 90%-100% of the peptide remains intact after exposure to a protease.

[0309] Peptide Stability in Acidic Conditions. Peptides of this disclosure can be administered in biological environments that are acidic. For example, after oral administration, peptides can experience acidic environmental conditions in the gastric fluids of the stomach and gastrointestinal (GI) tract. The pH of the stomach can range from ˜1-4 and the pH of the GI tract ranges from acidic to normal physiological pH descending from the upper GI tract to the colon. In addition, the vagina, late endosomes, lysosomes, and the tumor microenvironment can also have acidic pH values, such as less than pH 7.4. These acidic conditions can lead to denaturation of peptides and proteins into unfolded states. Unfolding of peptides and proteins can lead to increased susceptibility to subsequent digestion by other enzymes as well as loss of biological activity of the peptide.

[0310] In certain embodiments, the peptides of this disclosure can resist denaturation and degradation in acidic conditions and in buffers, which simulate acidic conditions. In certain embodiments, peptides of this disclosure can resist denaturation or degradation in buffer with a pH less than 1, a pH less than 2, a pH less than 3, a pH less than 4, a pH less than 5, a pH less than 6, a pH less than 7, or a pH less than 8. In some embodiments, peptides of this disclosure remain intact at a pH of 1-3. In certain embodiments, at least 5%-10%, at least 10%-20%, at least 20%-30%, at least 30%-40%, at least 40%-50%, at least 50%-60%, at least 60%-70%, at least 70%-80%, at least 80%-90%, or at least 90%-100% of the peptide remains intact after exposure to a buffer with a pH less than 1, a pH less than 2, a pH less than 3, a pH less than 4, a pH less than 5, a pH less than 6, a pH less than 7, or a pH less than 8. In other embodiments, at least 5%-10%, at least 10%-20%, at least 20%-30%, at least 30%-40%, at least 40%-50%, at least 50%-60%, at least 60%-70%, at least 70%-80%, at least 80%-90%, or at least 90%-100% of the peptide remains intact after exposure to a buffer with a pH of 1-3. In other embodiments, the peptides of this disclosure can be resistant to denaturation or degradation in simulated gastric fluid (pH 1-2). In some embodiments, at least 5-10%, at least 10%-20%, at least 20%-30%, at least 30%-40%, at least 40%-50%, at least 50%-60%, at least 60%-70%, at least 70%-80%, at least 80%-90%, or at least 90-100% of the peptide remains intact after exposure to simulated gastric fluid. In some embodiments, low pH solutions such as simulated gastric fluid or citrate buffers can be used to determine peptide stability.

[0311] Peptide Stability at High Temperatures. In some embodiments, the peptides of the present disclosure are resistant to an elevated temperature. Peptides of this disclosure can be administered in biological environments with high temperatures. For example, after oral administration, peptides can experience high temperatures in the body. Body temperature can range from 36° C. to 40° C. High temperatures can lead to denaturation of peptides and proteins into unfolded states. Unfolding of peptides and proteins can lead to increased susceptibility to subsequent digestion by other enzymes as well as loss of biological activity of the peptide. In some embodiments, a peptide of this disclosure can remain intact at temperatures from 25°° C. to 100° C. High temperatures can lead to faster degradation of peptides. Stability at a higher temperature can allow for storage of the peptide in tropical environments or areas where access to refrigeration is limited. In certain embodiments, 5%-100% of the peptide can remain intact after exposure to 25°° C. for 6 months to 5 years. 5%-100% of a peptide can remain intact after exposure to 70° C. for 15 minutes to 1 hour. 5%-100% of a peptide can remain intact after exposure to 100° C. for 15 minutes to 1 hour. In other embodiments, at least 5%-10%, at least 10%-20%, at least 20%-30%, at least 30%-40%, at least 40%-50%, at least 50%-60%, at least 60%-70%, at least 70%-80%, at least 80%-90%, or at least 90%-100% of the peptide remains intact after exposure to 25° C. for 6 months to 5 years. In other embodiments, at least 5%-10%, at least 10%-20%, at least 20%-30%, at least 30%-40%, at least 40%-50%, at least 50%-60%, at least 60%-70%, at least 70%-80%, at least 80%-90%, or at least 90%-100% of the peptide remains intact after exposure to 70° C. for 15 minutes to 1 hour. In other embodiments, at least 5%-10%, at least 10%-20%, at least 20%-30%, at least 30%-40%, at least 40%-50%, at least 50%-60%, at least 60%-70%, at least 70%-80%, at least 80%-90%, or at least 90%-100% of the peptide remains intact after exposure to 100° C. for 15 minutes to 1 hour.

### Pharmacokinetics of Peptides

[0312] The pharmacokinetics of any of the peptides of this disclosure can be determined after administration of the peptide via different routes of administration. For example, the pharmacokinetic parameters of a peptide of this disclosure can be quantified after intravenous, subcutaneous, intramuscular, rectal, aerosol, parenteral, ophthalmic, pulmonary, transdermal, vaginal, optic, nasal, oral, sublingual, inhalation, dermal, intrathecal, intranasal, intra-tumoral, intra-articular, peritoneal, buccal, synovial, intra-organ, or topical administration. Peptides of the present disclosure can be analyzed by using tracking agents such as radiolabels or fluorophores. For example, a radiolabeled peptide of this disclosure can be administered via various routes of administration. Peptide concentration or dose recovery in various biological samples such as plasma, urine, feces, any organ, skin, muscle, and other tissues can be determined using a range of methods including HPLC, fluorescence detection techniques (TECAN quantification, flow cytometry, iVIS), or liquid scintillation counting.

[0313] The methods and compositions described herein can relate to pharmacokinetics of peptide administration via any route to a subject. Pharmacokinetics can be described using methods and models, for example, compartmental models or noncompartmental methods. Compartmental models include but are not limited to monocompartmental model, the two compartmental model, the multicompartmental model or the like. Models can be divided into different compartments and can be described by the corresponding scheme. For example, one scheme is the absorption, distribution, metabolism and excretion (ADME) scheme. For another example, another scheme is the liberation, absorption, distribution, metabolism and excretion (LADME) scheme. In some aspects, metabolism and excretion can be grouped into one compartment referred to as the elimination compartment. For example, liberation can include liberation of the active portion of the composition from the delivery system, absorption includes absorption of the active portion of the composition by the subject, distribution includes distribution of the composition through the blood plasma and to different tissues, metabolism, which includes metabolism or inactivation of the composition and finally excretion, which includes excretion or elimination of the composition or the products of metabolism of the composition. Compositions administered intravenously to a subject can be subject to multiphasic pharmacokinetic profiles, which can include but are not limited to aspects of tissue distribution and metabolism/excretion. As such, the decrease in plasma or serum concentration of the composition is often biphasic, including, for example an alpha phase and a beta phase, occasionally a gamma, delta or other phase is observed

[0314] Pharmacokinetics includes determining at least one parameter associated with administration of a peptide to a subject. In some aspects, parameters include at least the dose (D), dosing interval (τ), area under curve (AUC), maximum concentration (Cₘₐₓ), minimum concentration reached before a subsequent dose is administered (Cₘᵢₙ), minimum time (Tₘᵢₙ), maximum time to reach Cmax (Tₘₐₓ), volume of distribution (V_{d}), steady-state volume of distribution (Vₛₛ), back-extrapolated concentration at time 0 (Co), steady state concentration (Cₛₛ), elimination rate constant (k_{c}), infusion rate (kᵢₙ), clearance (CL), bioavailability (f), fluctuation (% PTF) and elimination half-life (t_{1/2}).

[0315] In certain embodiments, the peptides of any of SEQ ID NO: 1-SEQ ID NO: 1134, SEQ ID NO: 1243-SEQ ID NO: 1262, or SEQ ID NO: 1263-SEQ ID NO: 1316 exhibit optimal pharmacokinetic parameters after oral administration. In other embodiments, the peptides of any of SEQ ID NO: 1-SEQ ID NO: 1134, SEQ ID NO: 1243-SEQ ID NO: 1262, or SEQ ID NO: 1263-SEQ ID NO: 1316 exhibit optimal pharmacokinetic parameters after any route of administration, such as oral administration, inhalation, intranasal administration, topical administration, parenteral administration, intravenous administration, subcutaneous administration, intra-tumoral, intra-articular administration, intramuscular administration, intraperitoneal administration, transdermal administration, dermal administration, or any combination thereof.

[0316] In some embodiments any peptide of SEQ ID NO: 1-SEQ ID NO: 1134, SEQ ID NO: 1243-SEQ ID NO: 1262, or SEQ ID NO: 1263-SEQ ID NO: 1316 exhibits an average Tₘₐₓ of 0.5-12 hours, or 1-48 hours at which the Cₘₐₓ is reached, an average bioavailability in serum of 0.1%-10% in the subject after administering the peptide to the subject by an oral route, an average bioavailability in serum of less than 0.1% after oral administration to a subject for delivery to the GI tract, an average bioavailability in serum of 10-100% after parenteral administration, an average t½ of 0.1 hours-168 hours, or 0.25 hours-48 hours in a subject after administering the peptide to the subject, an average clearance (CL) of 0.5-100 L/hour or 0.5-50 L/hour of the peptide after administering the peptide to a subject, an average volume of distribution (Va) of 200-20,000 mL in the subject after systemically administering the peptide to the subject, or optionally no systemic uptake, any combination thereof.

### Methods of Manufacture

[0317] Various expression vector/host systems can be utilized for the production of the recombinant expression of peptides, peptide-I/O complexes, or I/Os described herein. Non-limiting examples of such systems include microorganisms such as bacteria transformed with recombinant bacteriophage DNA, plasmid DNA or cosmid DNA expression vectors containing a nucleic acid sequence encoding peptides or peptide fusion proteins/chimeric proteins or proteins described herein, yeast transformed with recombinant yeast expression vectors containing the aforementioned nucleic acid sequence, insect cell systems infected with recombinant virus expression vectors (e.g., baculovirus) containing the aforementioned nucleic acid sequence, plant cell systems infected with recombinant virus expression vectors (e.g., cauliflower mosaic virus (CaMV), tobacco mosaic virus (TMV) or transformed with recombinant plasmid expression vectors (e.g., Ti plasmid) containing the aforementioned nucleic acid sequence, or animal cell systems infected with recombinant virus expression vectors (e.g., adenovirus, vaccinia virus) including cell lines engineered to contain multiple copies of the aforementioned nucleic acid sequence, either stably amplified (e.g., CHO/dhfr, CHO/glutamine synthetase) or unstably amplified in double-minute chromosomes (e.g., murine cell lines). Disulfide bond formation and folding of the peptide could occur during expression or after expression or both.

[0318] A host cell can be adapted to express one or more peptides or proteins, or peptide-I/O complexes, described herein. The host cells can be prokaryotic or eukaryotic, and includes insect cells. In some cases, host cells are capable of modulating the expression of the inserted sequences, or modifying and processing the gene or protein product in the specific fashion desired. For example, expression from certain promoters can be elevated in the presence of certain inducers (e.g., zinc and cadmium ions for metallothionine promoters). In some cases, modifications (e.g., phosphorylation and glycosylation) and processing (e.g., cleavage) of peptide products can be important for the function of the peptide. Host cells can have characteristic and specific mechanisms for the post-translational processing and modification of a peptide. In some cases, the host cells used to express the peptides secretes minimal amounts of proteolytic enzymes.

[0319] In the case of cell- or viral-based samples, organisms can be treated prior to purification to preserve and/or release a target polypeptide. In some embodiments, the cells are fixed using a fixing agent. In some embodiments, the cells are lysed. The cellular material can be treated in a manner that does not disrupt a significant proportion of cells, but which removes proteins from the surface of the cellular material, and/or from the interstices between cells. For example, cellular material can be soaked in a liquid buffer or, in the case of plant material, can be subjected to a vacuum, in order to remove proteins located in the intercellular spaces and/or in the plant cell wall. If the cellular material is a microorganism, proteins can be extracted from the microorganism culture medium. Alternatively, the peptides can be packed in inclusion bodies. The inclusion bodies can further be separated from the cellular components in the medium. In some embodiments, the cells are not disrupted. A cellular or viral peptide that is presented by a cell or virus can be used for the attachment and/or purification of intact cells or viral particles. Alternatively the peptide or protein can be secreted from cells into the culture media. In addition to recombinant systems, Peptides and polypeptides can also be synthesized in a cell-free system using a variety of known techniques employed in protein and peptide synthesis.

[0320] In some cases, a host cell produces a peptide that has an attachment point for a drug. An attachment point could comprise a lysine residue, an N-terminus, a cysteine residue, a cysteine disulfide bond, or a non-natural amino acid. A non-natural amino acid can be incorporated by synthetic or recombinant techniques.

[0321] The peptide can also be produced synthetically, such as by solid-phase peptide synthesis, or solution-phase peptide synthesis. Peptide synthesis can be performed by fluorenylmethyloxycarbonyl (Fmoc) chemistry, for example according to the Fmoc solid phase peptide synthesis method (“Fmoc solid phase peptide synthesis, a practical approach,” edited by W. C. Chan and P. D. White, Oxford University Press, 2000), or by butyloxycarbonyl (Boc) chemistry. The peptide can be folded (such as formation of disulfide bonds) during synthesis or after synthesis or both and can be executed by methods known in the art, such as incubation of the peptide at a mildly basic pH in the presence of a redox pair such as reduced and oxidized cysteine or glutathione, either after cleavage and protecting group removal and purification, or while still on the resin. Peptide fragments can be produced enzymatically or synthetically or recombinantly and then joined together synthetically, recombinantly, or via an enzyme.

[0322] In other aspects, the peptides of the present disclosure can be prepared by conventional solution phase peptide synthesis.

[0323] RNA polynucleotides can also be produced using the methods described in U.S. Pat. No. 9,279,149, and is incorporated herein by reference. In some embodiments, RNA polynucleotides are synthesized by enzymatic/PCR methods. For example, RNA polynucleotides can be synthesized using an enzyme, such as a nucleotidyl transferase (e.g., E. coli poly(A) polymerase or F. coli poly(U) polymerase), which can add RNA nucleotides to the 3′ end. Alternatively, E. coli poly(U) polymerase can be used. A 3′ unblocked reversible terminator ribonucleotide triphosphates (rNTPs) can be used during polynucleotide synthesis. Alternatively, 3′blocked, 2′blocked, or 2′-3′ blocked rNTPs can be used alongside either enzyme described above. RNA polynucleotides can also be synthesized using standard solid-phase synthesis techniques and phosphoramidite-based methods. RNA polynucleotides of the present disclosure can be prepared by conventional solid phase oligonucleotide synthesis. For example any method of solid-phase synthesis can be employed including, but not limited to methods described, as shown at https://www.atdbio.com/content/17/Solid-phase-oligonucleotide-synthesis, and in Albericio (Solid-Phase Synthesis: A practical guide, CRC Press, 2000), Lambert et al. (Oligonucleotide Synthesis: Solid-Phase Synthesis, DNA, DNA Sequencing, RNA, Small Interfering RNA, Nucleoside, Nucleic Acid, Nucleotide, Phosphoramidite, Sense, Betascript Publishing, 2010), and Guzaev, A. P. et al. (Current Protocols in Nucleic Acid Chemistry. 2013; 53:3.1:3.1.1-3.1.60.), each of which are incorporated herein by reference. Solid supports such as CPG or polystyrene can be used. Phosphoramidite chemistry can be used by cycling through the following steps: detritylation of the support-bound 3′-nucleoside, activation and coupling, capping, and oxidation. At the end of synthesis, the protected nucleotide can be cleaved from the support and then deprotected. Protecting groups used in solid-phase synthesis of RNA polynucleotides can include t-butyldimethylsilyl (TBDMS) or tri-iso-propylsilyloxymethyl (TOM). The RNA polynucleotides can have a modified backbone to enhance stability. Additionally, non-natural or modified bases can be used to serve as unique functional handles for subsequent chemical conjugation. In some embodiments, modification of the 5′ and or 3′ ends of the RNA can be performed to result in desired functional groups, stability, or activity. In some embodiments, the functional bandles comprise modified bases including one or more modified uridine, modified guanisine, modified cytidine, or modified adenosine base of the RNA. An example of such modified base is a uridine with an extended amine.

[0324] An I/O of this disclosure can be made synthetically, recombinantly, or by small molecule synthesis techniques. The peptides of this closure can be made synthetically or recombinantly. The peptide and I/O can be combined by organic synthesis techniques, by polypeptide fusion during recombinant expression, by enzymatic ligation, by formulation, or by other means.

### Pharmaceutical Compositions of Peptides and Peptide-I/O Complexes

[0325] A pharmaceutical composition of the disclosure can be a combination of any peptide or peptide-I/O complex described herein, or a salt thereof, with other chemical components, such as carriers, stabilizers, diluents, dispersing agents, suspending agents, thickening agents, antioxidants, solubilizers, buffers, osmolytes, salts, surfactants, amino acids, encapsulating agents, bulking agents, cryoprotectants, and/or excipients. The pharmaceutical composition facilitates administration of a peptide or peptide-I/O complex described herein to an organism. Pharmaceutical compositions can be administered in therapeutically-effective amounts as pharmaceutical compositions by various forms and routes including, for example, intravenous, subcutaneous, intramuscular, rectal, aerosol, parenteral, ophthalmic, pulmonary, transdermal, vaginal, optic, nasal, oral, sublingual, inhalation, dermal, intrathecal, intranasal, intra-tumoral, intra-articular, topical administration, intra-organ, or a combination thereof. A pharmaceutical composition can be administered in a local or systemic manner, for example, via injection of the peptide described herein directly into an organ, optionally in a depot.

[0326] Parenteral injections can be formulated for bolus injection or continuous infusion. The pharmaceutical compositions can be in a form suitable for parenteral injection as a sterile suspension, solution or emulsion in oily or aqueous vehicles, and can contain formulatory agents such as suspending, stabilizing and/or dispersing agents. Pharmaceutical formulations for parenteral administration include aqueous solutions of a peptide described herein in water soluble form. Suspensions of peptides described herein can be prepared as oily injection suspensions. Suitable lipophilic solvents or vehicles include fatty oils such as sesame oil, or synthetic fatty acid esters, such as ethyl oleate or triglycerides, or liposomes. Aqueous injection suspensions can contain substances which increase the viscosity of the suspension, such as sodium carboxymethyl cellulose, sorbitol, or dextran. The suspension can also contain suitable stabilizers or agents which increase the solubility and/or reduces the aggregation of such peptides described herein to allow for the preparation of highly concentrated solutions. Alternatively, the peptides described herein can be lyophilized or in powder form for re-constitution with a suitable vehicle, e.g., sterile pyrogen-free water, before use. In some embodiments, a purified peptide is administered intravenously.

[0327] A peptide or peptide-I/O complex of the disclosure can be applied directly to an organ, or an organ tissue or cells, such as brain or brain tissue or cancer cells, during a surgical procedure. The recombinant peptides described herein can be administered topically and can be formulated into a variety of topically administrable compositions, such as solutions, suspensions, lotions, gels, pastes, medicated sticks, balms, creams, and ointments. Such pharmaceutical compositions can contain solubilizers, stabilizers, tonicity enhancing agents, buffers and preservatives.

[0328] In practicing the methods of treatment or use provided herein, therapeutically-effective amounts of the peptide described herein described herein can be administered in pharmaceutical compositions to a subject suffering from a condition that affects the immune system. In some embodiments, the subject is a mammal such as a human. A therapeutically-effective amount can vary widely depending on the severity of the disease, the age and relative health of the subject, the potency of the compounds used, and other factors.

[0329] Pharmaceutical compositions can be formulated using one or more physiologically-acceptable carriers comprising excipients and auxiliaries, which facilitate processing of the active compounds into preparations that can be used pharmaceutically. Formulation can be modified depending upon the route of administration chosen. Pharmaceutical compositions comprising a peptide described herein can be manufactured, for example, by expressing the peptide in a recombinant system, purifying the peptide, lyophilizing the peptide, mixing, dissolving, granulating, dragee-making, levigating, emulsifying, encapsulating, entrapping, or compression processes. The pharmaceutical compositions can include at least one pharmaceutically acceptable carrier, diluent, or excipient and compounds described herein as free-base or pharmaceutically-acceptable salt form.

[0330] Methods for the preparation of peptides or peptide-I/O complexes described herein, or a salt thereof, comprising the compounds described herein include formulating the peptide described herein with one or more inert, pharmaceutically-acceptable excipients or carriers to form a solid, semi-solid, or liquid composition. Solid compositions include, for example, powders, tablets, dispersible granules, capsules, cachets, and suppositories. These compositions can also contain minor amounts of nontoxic, auxiliary substances, such as wetting or emulsifying agents, pH buffering agents, and other pharmaceutically-acceptable additives.

[0331] Non-limiting examples of pharmaceutically-acceptable excipients can be found, for example, in Remington: The Science and Practice of Pharmacy, Nineteenth Ed (Easton, Pa.: Mack Publishing Company, 1995); Hoover, John E., Remington's Pharmaceutical Sciences, Mack Publishing Co., Easton, Pennsylvania 1975; Liberman, H. A. and Lachman, L., Eds., Pharmaceutical Dosage Forms, Marcel Decker, New York, N.Y., 1980; and Pharmaceutical Dosage Forms and Drug Delivery Systems, Seventh Ed. (Lippincott Williams & Wilkins 1999), each of which is incorporated by reference in its entirety.

[0332] Liposomes can be prepared by any methods known in the art, including Stealth and other liposomes. Liposome preparation can include drying down lipids from organic solvent, dispersing the liquid in aqueous media, and purification or sizing including sonication or extrusion as needed. Liposomes can be loaded by passive or active loading techniques, including mechanical dispersion, solid dispersion, detergent removal, any methods as disclosed in (Akbarzadeh et al. Nanoscale Research Letters 2013, 8:102), or any other methods known in the art.

### Treatment of Cancer

[0333] The term “effective amount,” as used herein, can refer to a sufficient amount of an agent or a compound being administered which will lead to an immune response to the tumor and reduction or elimination of cancer cells. The result can be reduction in the need for other, more toxic therapies, improvement in progression-free survival, improvement in long-term overall survival, a slower rate of progression, prevention of metastases, improvement in quality of life, remission, complete remission, partial remission, reduced symptoms, or any combination thereof. Compositions containing such agents or compounds can be administered for prophylactic, enhancing, and/or therapeutic treatments. An appropriate “effective” amount in any individual case can be determined using techniques, such as a dose escalation study.

[0334] The methods, compositions, and kits of this disclosure can comprise a method to prevent, treat, arrest, reverse, or ameliorate the symptoms of a condition when used alone or in combination with other treatments. Current treatments for cancer can involve the use of multiple drugs in addition to surgery and radiation. Combinations of a variety of tratments can be more effective than individual drugs, and can lead to a complete cure. Combinations can especially be important in the immuno-oncology field, where complementary and/or synergistic combinations are known. Combinations can be effective where individual drugs show no obvious effect. For example, radiation can be used in combination with chemotherapy in treatment of human carcinoma. Similar effects can be seen in mice (Dewan et al., Clin Cancer Res. 2012 Dec. 15;18(24):6668-78). Radiation can be used in combination with any peptide-I/O complex of the present disclosure. Antibodies against the checkpoint inhibitors, PD1 and CTLA4, are recently approved drugs that can see enhanced therapeutic efficacy in combination with each other as well as with other drugs. This can be seen in mouse tumor models (Fallon 2017, Fu 2015,). Antibodies against said checkpoint inhibitors can be used in combination with any peptide-I/O complex of the present disclosure. Other checkpoint inhibitors being investigated such as TIM3, LAG3, KIR can also be administered in combination with any peptide-I/O complex of the present disclosure.

[0335] Peptide-I/O complexes of the present disclosure are designed to increase the efficacy or widen the therapeutic window of the I/O. Treatments that are efficacious in combination with the I/O alone can also be efficacious in combination with the peptide-I/O complex. Examples of such treatments include combination therapies that have shown preclinical or clinical activity: IL-15 agent, such as IL-15 superagonists, with anti-PD-L₁, anti-CTLA-4, anti-CD40, or cyclophosphamide (Robinson and Schluns, Immunol Lett 190:159-168 (2017)); 4-1BB ligands with IL-12, anti-CTLA-4, anti-PD-1, radiation, cisplatin, 5-fluorouracil, cyclophosphamide, cetuximab, rituximab, or trastuzumab (Bartkowiak and Curran, Front Oncol 5:117 (2015)); STING ligands with vaccines, radiation, 5-fluorouracil, GM-CSF, or anti-PD-1 (Vargas et al., Eur J Cancer 75:86-97 (2017)). Other emerging immunotherapy targets may generate clinical therapeutics that can be combined with a peptide-I/O complex of the present disclosure to improve efficacy and/or reduce toxicity. These include members of the B7 family, including B7x, HHLA2, and B7-H3; VISTA; CD27; OX40/OX40L; GITR; Tim-3; LAG-3; BTLA; and IDO synthase (Assal et al, Immunotherapy 7:1169-1186 (2015)). The peptide-I/O complexes of the present disclosure can be administered alone or in combination with other therapies, diagnostic or imaging agents (whether linked to the peptide-I/O complex or used as a diagnostic or imaging agent linked to the peptide in conjunction with the peptide-I/O complex), such as I/O, chemical agents, biological agents, antibodies, radio-therapeutic agents, imaging agents, diagnostic agents, photosensitizing agents, radiosensitizing agents, nutrition, chemotherapy, toxins, protein, peptide, or small molecule chemotherapeutic entity of the following classes generally recognized as chemotherapies: alkylating agents, topoisomerase inhibitors, microtubulin inhibitors, cytotoxic antibiotics, and antimetabolites, such agent intended for or having therapeutic effect (whether curative, ameliorative or prophylactic), and the like. The peptide-I/O complexes of the present disclosure can be administered alone or in combination with a companion diagnostic or imaging agent (whether such diagnostic or imaging agent is linked to the peptide-I/O complex or used as a separate companion diagnostic or imaging agent linked to the peptide for use in conjunction with the peptide-I/O complex) such as chemical agents, radiolabel agents, radiosensitizing agents, fluorophores, imaging agents, diagnostic agents, protein, peptide, or small molecule such agent intended for or having diagnostic or imaging effect. Agents used for companion diagnostic agents and companion imaging agents can include the diagnostic and imaging agents described herein. Diagnostic tests can be used to enhance the use of therapeutic products, such as those disclosed herein. The development of therapeutic products with a corresponding diagnostic test, such as a test that uses diagnostic imaging (whether in vivo or in vitro) can aid in diagnosis, treatment, identify patient populations for treatment, and enhance therapeutic effect of the corresponding therapy. Tests also aid therapeutic product development to obtain the data FDA uses to make regulatory determinations. For example, such a test can identify appropriate subpopulations for treatment or identify populations who should not receive a particular treatment because of an increased risk of a serious side effect, making it possible to individualize, or personalize, medical therapy by identifying patients who are most likely to respond, or who are at varying degrees of risk for a particular side effect. Thus, the present disclosure, in some embodiments, includes the joint development of therapeutic products and diagnostic devices (used to detect the peptide I/O complexes themselves, or used to detect the companion diagnostic or imaging agent, whether such diagnostic or imaging agent is linked to the peptide-I/O complex or used as a separate companion diagnostic or imaging agent linked to the peptidefor use in conjunction with the peptide-I/O complex) that are used in conjunction with safe and effective use of the peptide-I/O complexes as therapeutic products. Non-limiting examples of companion devices include a surgical instrument, such as an operating microscope, confocal microscope, fluorescence scope, exoscope, endoscope, or a surgical robot and devices used in biological diagnosis or imaging or that incorporate radiology, including the imaging technologies of X-ray radiography, magnetic resonance imaging (MRI), medical ultrasonography or ultrasound, endoscopy, elastography, tactile imaging, thermography, medical photography and nuclear medicine functional imaging techniques as positron emission tomography (PET) and Single-photon emission computed tomography (SPECT). Companion diagnostics and devices may comprise tests that are conducted ex vivo, including detection of signal from tissues or cells that are removed following administration of the companion diagnostic to the subject, or application of the companion diagnostic or companion imaging agent directly to tissues or cells following their removal from the subject and then detecting signal. Examples of devices used for ex vivo detection include fluorescence microscopes, flow cytometers, and the like.

[0336] The methods, compositions, and kits of this disclosure can comprise a method to prevent, treat, arrest, reverse, or ameliorate the symptoms of a condition. The treatment can comprise treating a subject (e.g., an individual, a domestic animal, a wild animal or a lab animal afflicted with a disease or condition) with a peptide of the disclosure. In treating a disease, the peptide or peptide-I/O complex can contact the tumor of a subject. The subject can be a human. A subject can be a human; a non-human primate such as a chimpanzee, or other ape or monkey species; a farm animal such as a cattle, horse, sheep, goat, swine; a domestic animal such as a rabbit, dog, and cat; a laboratory animal including a rodent, such as a rat, mouse and guinea pig, or the like. A subject can be of any age. A subject can be, for example, an elderly adult, adult, adolescent, pre-adolescent, child, toddler, infant, or fetus in utero.

[0337] Treatment can be provided to the subject before clinical onset of disease. Treatment can be provided to the subject after clinical onset of disease. Treatment can be provided to the subject after 1 day, 1 week, 6 months, 12 months, or 2 years or more after clinical onset of the disease. Treatment may be provided to the subject for more than 1 day, 1 week, 1 month, 6 months, 12 months, 2 years or more after clinical onset of disease. Treatment may be provided to the subject for less than 1 day, 1 week, 1 month, 6 months, 12 months, or 2 years or 5 years after clinical onset of the disease. Treatment can also include treating a human in a clinical trial. A treatment can comprise administering to a subject a pharmaceutical composition, such as one or more of the pharmaceutical compositions described throughout the disclosure. A treatment can comprise a once daily dosing. A treatment can comprise a single dose or two doses. A treatment can comprise once weekly, biweekly, or monthly dosing, or dosing one to five times per year. A treatment can comprise administering a peptide or peptide-I/O complex to a subject, either parenterally, intravenously, subcutaneously, intramuscularly, by inhalation, dermally, intra-articular injection, orally, intrathecally, transdermally, intranasally, via a peritoneal route, or directly onto the tumor or into the tumor microenvironment, e.g., via a direct injection route.

[0338] In some embodiments, the present disclosure provides a method for treating a cancer or tumor, the method comprising administering to a subject in need thereof an effective amount of a peptide or peptide-I/O complex of the present disclosure. One example of cancers or conditions that can be treated with a peptide or peptide-I/O complex of the disclosure is solid tumors. Another example of cancers that can be treated with a peptide or peptide-I/O complex of this disclosure are liquid tumors such as lymphomas, leukemias, and hematological malignancies. Further examples of cancers or conditions that can be treated with a peptide or peptide-I/O complex of the disclosure include triple negative breast cancer, breast cancer, breast cancer metastases, metastases of any cancers described herein, colon cancer, colon cancer metastases, sarcomas, acute lymphoblastic leukemia, acute myeloid leukemia, adrenocortical carcinoma, AIDS-related cancers such as Kaposi sarcoma, AIDS-related lymphoma, primary CNS lymphoma, anal cancer, appendix cancer, childhood astrocytomas, astrocytomas, childhood atypical teratoid/rhabdiod tumor, CNS atypical teratoid/rhabdiod tumor, atypical teratoid/rhabdiod tumor, basal cell carcinoma, skin cancer, bile duct cancer, bladder cancer, bone cancer, Ewing sarcoma family of tumors, osteosarcoma, chondroma, chondrosarcoma, primary and metastatic bone cancer, malignant fibrous histiocytoma, childhood brain stem glioma, brain stem glioma, brain tumor, brain and spinal cord tumors, central nervous system embryonal tumors, childhood central nervous system embryonal tumors, central nervous system germ cell tumors, childhood central nervous system germ cell tumors, craniopharyngioma, childhood craniopharyngioma, ependymoma, childhood ependymoma, breast cancer, bronchial tumors, childhood bronchial tumors, burkitt lymphoma, carcinoid tumor, gastrointestinal cancer, carcinoma of unknown primary, cardiac tumors, childhood cardiac tumors, primary lymphoma, cervical cancer, cholangiocarcinoma, chordoma, childhood chordoma, chronic lymphocytic leukemia, chronic myelogenous leukemia, chronic myeloproliferative neoplasms, colon cancer, colorectal cancer, cutaneous T cell lymphoma, diffuse midline glioma, ductal carcinoma in situ, embryonal tumors, endometrial cancer, ependymoma, esophageal cancer, esthesioneuroblastoma, childhood esthesioneuroblastoma, ewing sarcoma, extracranial germ cell tumor, childhood extracranial germ cell tumor, extragonadal germ cell tumor, eye cancer, intraocular melanoma, retinoblastoma, fallopian tube cancer, fibrous histiocytoma of bone, gallbladder cancer, gastric cancer, gastrointestinal carcinoid tumor, gastrointestinal stromal tumors, ovarian cancer, testicular cancer, gestational trophoblastic disease, glioma, glioblastoma multiforme (GBM), low-grade glioma (LGG), gliomatosis cerebri, hairy cell leukemia, head and neck cancer, hepatocellular cancer, histiocytosis, Langerhans cell histiocytosis, hodgkin lymphoma, hypopharyngeal cancer, intraocular melanoma, melanoma, melanoma metastases, islet cell tumors, pancreatic neuroendocrine tumors, kidney cancer, renal cell tumors, Wilms tumor, childhood kidney tumors, lip and oral cavity cancer, liver cancer, lung cancer, medulloblastoma, nonhodgkin lymphoma, macroglodulinemia, Waldenstrom macroglodulinemia, male breast cancer, merkel cell carcinoma, metastatic squamous neck cancer with occult primary, midline tract carcinoma involving NUT gene, mouth cancer, multiple endocrine neoplasia syndromes, childhood multiple endocrine neoplasia syndromes, multiple myeloma/plasma cell neoplasm, mycosis fungoides, myelodysplastic syndromes, myelodysplastic/myeloproliferative neoplasms, multiple myeloma, myloproliferative neoplasms, chronic myeloproliferative neoplasms, myxopapillary ependymoma, nasal cavity and paranasal sinus cancer, nasopharyngeal cancer, neuroblastoma, non-small cell lung cancer, oligodendroglioma, oligoastrocytoma, oropharyngeal cancer, ovarian cancer, low malignant potential tumor, pancreatic cancer, pancreatic neuroendocrine tumors, papillomatosis, childhood papillomatosis, paraganglioma, paranasal sinus and nasal cavity cancer, parathyroid cancer, penile cancer, pheochromocytoma, pharyngeal cancer, pilocytic astrocytoma, pituitary tumor, pleomorphic xanthoastrocytoma (PXA), pleuropulmonary blastoma, childhood pleuropulmonary blastoma, primary peritoneal cancer, prostate cancer, rectal cancer, pregnancy-related cancer, rhabdomyosarcoma, childhood rhabdomyosarcoma, salivary gland cancer, Sezary syndrome, small cell lung cancer, small intestine caner, soft tissue sarcoma, squamous cell carcinoma, testicular cancer, throat cancer, thymoma, thymic carcinoma, thyroid cancer, transitional cell cancer of the renal, pelvis, and ureter, uterine cancer, urethral cancer, endometrial cancer, uterine sarcoma, vaginal cancer, vascular tumors, and vulvar cancers.

[0339] In certain embodiments, the peptide of the disclosure is mutated to home, distribute to, target, migrate to, accumulate in, or is directed to certain tissues but not to others, to change the strength or specificity of its function, or to gain or lose function.

[0340] In some embodiments, the present disclosure provides a method for treating a cancer, the method comprising administering to a subject in need thereof an effective amount of a peptide or peptide-I/O complex of the present disclosure.

[0341] In some embodiments, the present disclosure provides a method for treating a cancer, the method comprising administering to a patient in need thereof an effective amount of a pharmaceutical composition comprising a peptide or peptide-I/O complex of the present disclosure and a pharmaceutically acceptable carrier.

[0342] In some embodiments, the present disclosure provides a method for inhibiting invasive activity of cells, the method comprising administering an effective amount of a peptide or peptide-I/O complex of the present disclosure to a subject.

[0343] A peptide comprising the sequence of any of SEQ ID NO: 1-SEQ ID NO: 1134, SEQ ID NO: 1243-SEQ ID NO: 1262, or SEQ ID NO: 1263-SEQ ID NO: 1316, and any peptide derivative or peptide-I/O complex as described herein, can be used to target cancers (e.g., brain tumors, breast cancer, soft tissue sarcoma, renal cell cancer, small cell lung cancer, colorectal cancer, upper GI cancers, pancreatic cancer, prostate cancer, squamous cell carcinoma of the head and neck, urothelial carcinoma, ovarian carcinoma, synovial carcinoma, bladder carcinoma, salivary gland carcinoma, uterine carcinoma, esophageal carcinoma, gastric cancer, cervical carcinoma, skin cancer, osteosarcoma, or any other solid tumor). A peptide comprising the sequence of any of SEQ ID NO: 1-SEQ ID NO: 1134, SEQ ID NO: 1243-SEQ ID NO: 1262, or SEQ ID NO: 1263-SEQ ID NO: 1316, and any peptide derivative or peptide-I/O complex as described herein, can be used to additionally target any cancers, or to target delivery of the I/O intracellularly, optionally to the cytoplasm, the endosome, or subcellular compartments.

[0344] In some embodiments, the peptides described herein provide a method of treating a cancer condition of a subject, the method comprising administering to the subject a therapeutically-effective amount of a peptide-I/O complex comprising the sequence SEQ ID NO: 1 or fragment thereof. In some embodiments, the peptides described herein provide a method of treating a cancer condition of a subject, the method comprising administering to the subject a peptide-I/O complex of any one of SEQ ID NO: 1-SEQ ID NO: 1134, SEQ ID NO: 1243-SEQ ID NO: 1262, or SEQ ID NO: 1263-SEQ ID NO: 1316 or fragment thereof.

[0345] Venom or toxin derived peptide(s), peptides, modified peptides, labeled peptides, peptide-I/O complexes, and pharmaceutical compositions described herein can be administered for therapeutic treatments. In therapeutic applications, the composition can be administered to a subject already suffering from a disease or condition, in an amount sufficient to cure or at least partially arrest the symptoms of the disease or condition, or to cure, heal, improve, or ameliorate the condition. Such peptides described herein can also be administered to prevent (either in whole or in part), lessen a likelihood of developing, contracting, or worsening a condition. Amounts effective for this use can vary based on the severity and course of the disease or condition, previous therapy, the subject's health status, weight, response to the drugs, and the judgment of the treating physician. Venom or toxin derived peptide(s), peptides, modified peptides, labeled peptides, peptide-I/O complexes, and pharmaceutical compositions described herein can allow for targeted homing of the peptide, peptide-I/O complex, and local delivery of any conjugate. For example, a peptide conjugated or co-formulated in a complex (e.g. liposomal formulation) with an I/O such as an IL-15 agent, 4-1BB ligands, RIG-I ligands, and/or STING ligands allows for local delivery of the I/O, which is significantly more effective and less toxic than traditional systemic deliver of I/O.

[0346] Some cancers can be in the brain or central nervous system (CNS). Various therapeutic treatments, such as I/Os, can be unable to cross the blood brain barrier (BBB) or enter the CNS at therapeutically adequate levels. Peptides of this disclosure, or variants thereof, can be BBB penetrating and can deliver I/Os to cancers of the CNS and the brain. Alternatively, peptides of this disclosure, or variants thereof, can be non-BBB penetrating in order to treat peripheral tumors while protecting the brain from exposure to I/Os.

### Kits

[0347] Peptides or peptide-I/O complexes can be packaged as a kit. In some embodiments, a kit includes written instructions on the use or administration of the peptides, I/Os, peptide-I/O complexes, or any combination thereof.

### EXAMPLES

[0348] The following examples are included to further describe some embodiments of the present disclosure, and should not be used to limit the scope of the disclosure.

### Example 1

### Manufacture of Peptides by Recombinant Expression

[0349] This example describes manufacture of peptides by recombinant expression. The peptide sequence is reverse-translated into DNA, synthesized, and cloned in-frame with siderocalin using standard molecular biology techniques. (M.R. Green, Joseph Sambrook. Molecular Cloning. 2012 Cold Spring Harbor Press.). The resulting construct is packaged into a lentivirus, transfected into HEK293 cells, expanded, isolated by immobilized metal affinity chromatography (IMAC), cleaved with tobacco etch virus protease, and purified to homogeneity by reverse-phase chromatography. Following purification, each peptide is lyophilized and stored frozen.

### Example 2

### Synthetic Manufacturing of Peptides

[0350] This example describes synthetic manufacturing of peptides. The peptide sequence was synthesized by solid phase peptide synthesis using standard Fmoc chemistry and protecting strategies. After synthesis, the peptide was cleaved from the resin and purified by reversed-phase chromatography. The peptide was folded and disulfides bonds were formed by incubation at mildly basic pH using a redox pair for oxidation. The folded peptide was then purified by reversed-phase chromatography, buffer exchanged, and lyophilized. The peptide was characterized by RP-HPLC, mass spectrometry, and optionally by other techniques such as 2D-NMR and LC-MS peptide mapping.

[0351] Peptides of SEQ ID NO: 568, SEQ ID NO: 683, and SEQ ID NO: 569 were synthesized by Fmoc chemistry, cleaved from the resin, folded, and purified. The mass of each peptide was verified by LC-MS and their purity was characterized by RP-HPLC.

[0352] Any of the peptides of the disclosure can be manufactured in a similar manner.

### Example 3

### Radiolabeling of Peptide

[0353] This example describes radiolabeling of peptides with standard techniques, such as reductive alkylation. See J Biol Chem. 254(11):4359-65 (1979); Methods in Enzymology V91:1983 p.570 and Journal of Biological Chemistry 254(11): 1979 p. 4359. An excess of 14C formaldehyde is used to ensure complete methylation (dimethylation of every free amine). The labeled peptides is isolated via solid-phase extraction on Strata-X columns (Phenomenex 8B-S100-AAK), rinsed with water with 5% methanol, and recovered in methanol with 2% formic acid. Solvent is subsequently removed in a blowdown evaporator with gentle heat and a stream of nitrogen gas.

### Example 4

### Isotopic Labelling of Peptides

[0354] This example describes isotopic labelling of peptides. During solid phase peptide synthesis, an isotopically labeled amino acid, 15N 13C arginine, was incorporated in the peptide. The isotopically labeled peptide was produced. The peptide was used to measure levels of peptide or peptide I/O complex in biological samples.

[0355] Solid-phase peptide synthesis was performed to generate a peptide of SEQ ID NO: 569, in which isotopically labeled arginine was incorporated. Arg14, Arg15 and Arg23 were incorporated with uniformly labelled 13C6 (98%) and 15N4 (98%) resulting in a properly folded peptide of SEQ ID NO: 569. The isotopically labeled peptide was further modified by conjugating a near-infrared dye ICG-sulfo to lysine 27 resulting in isotopically labeled conjugate with a mass of 4795.5 Daltons and a purity of 96%. The conjugate was successfully used to measure levels of peptides in the blood in animal studies.

[0356] Any of the peptides of the disclosure can be labelled in a similar manner.

### Example 5

### Peptide Detectable Agent Conjugates

[0357] This example describes the dye labeling of peptides. A peptide of SEQ ID NO: 2 or SEQ ID NO: 569 (non-GS version of SEQ ID NO: 2) was expressed recombinantly or chemically synthesized, and then the N-terminus of the peptide and/or the side chain amine of one or more lysine residues was conjugated to an detectable agent via an amide bond to produce a peptide-detectable agent conjugate. The detectable agent was an indocyanine green dye (ICG).

[0358] The peptide detectable agent conjugates were administered to a subject. The subject was a non-human animal in which cancer cells had been implanted and allowed to grow into tumors. After administration, the peptide detectable agent conjugates homed to the tumors. The subject, or a tissue from the subject, was imaged to visualize localization of the peptide detectable agent conjugates to tumors. Visualization of the peptide detectable agent conjugates in tumors after administration could be used as imaging or diagnistic agents in diagnosis of cancer. Confirmation of cancer in subject biopsies was confirmed by standard histopathology. A peptide of SEQ ID NO: 568 was applied to cells such as human glioma U373 or U87 cells or human lung carcinoma A549 cells and incubated for 24 h. The peptide was either applied by itself and detected by immunocytochemistry or was labeled with an Alexa-488 flurescent dye prior to application, then imaged by confocal microscopy. The peptide penetrated the cell and was detected at locations inside the cells such as near the trans-Golgi and in the perinuclear areas. Wiranowska et al., Cancer Cell Intl 11:1-13 (2011). Studies were performed to demonstrate the tumor accumulation of peptides disclosed herein. A peptide of SEQ ID NO: 569 was conjugated to an ICG dye to synthesize the molecule shown in FIG. 27. For generating allografts, mice (Female Balbc and C57BL6/J; Envigo) were inoculated with CT26, B16F10, or A20 cells in a 100 ul volume. Tumors were allowed to grow for 12-15 days post implantation and then tumor-bearing mice were IV injected with 10 nanomoles (100 uL volume) of a peptide of SEQ ID NO: 569 conjugated to an ICG dye. Tumors were resected 24 hours post administration and imaged using a near-infrared fluorescence scanner. FIG. 23 illustrates a white light image and the fluorescence signal in a CT26 tumor of a mouse that was not injected with a peptide of SEQ ID NO: 569 conjugated to an ICG dye and the signal in tumors from 2 mice that were injected with a peptide of SEQ ID NO: 569 conjugated to an ICG dye. FIG. 24 shows a white light image and the fluorescence signal in a B16F10 tumor of a mouse that was not injected with a peptide of SEQ ID NO: 569 conjugated to an ICG dye and the signal in tumors from 2 mice that were injected with a peptide of SEQ ID NO: 569 conjugated to an ICG dye. FIG. 25 shows a white light image and the fluorescence signal in a A20 tumor and in the muscle (contralateral flank) of a mouse that was not injected with a peptide of SEQ ID NO: 569 conjugated to an ICG dye and the signal in tumors and in the muscle (contralateral flank) from 2 mice that were injected with a peptide of SEQ ID NO: 569 conjugated to an ICG dye. The signal in tumor in the peptide of SEQ ID NO: 569 conjugated to an ICG dye-treated A20 mice were 5-11 times higher than the signal in muscle in these treated mice. Signal in tumors were 2000-4000-fold higher in CT26 tumors and 1000-1500 fold higher in B16F10 tumors than the signal in the tumor of the untreated mouse in each group. These data show that a peptide of SEQ ID NO: 569 conjugated to an ICG dye accumulate in CT26 colon cancer tumors, B16F10 melanoma tumors, and A20 lymphoma tumors in vivo.

[0359] Any of the peptides of the present disclosure can be labelled in a similar manner using an ICG dye. Other detectable dyes can be used to label peptides of the present disclosure as described herein.

### Example 6

### Dosing of Peptide

[0360] This example describes a dosing scheme for administering peptides to mice. Different dosages of the peptides are administered to Female Harlan athymic nude mice, weighing 20g-25g, via tail vein injection (n=2 mice per peptide). Optionally, the kidneys are ligated to prevent renal filtration of the peptides. Optionally, each peptide is radiolabeled by methylating lysines and the N-terminus, so the actual binding agent can contain methyl or dimethyl lysine(s) and a methylated or dimethylated amino terminus, and/or each peptide is labeled with a detectable agent such as Cy5.5-NHS ester.

[0361] A target dosage of 50-100 nmol of each peptide carrying 10-25 uCi of 14C, optionally comprising a fluorophore in a 1:1 molar ratio with the peptide is administered to Female Harlan athymic nude mice. Each peptide is allowed to freely circulate within the animal before the animals are euthanized and sectioned.

### Example 7

### Peptide Homing

[0362] This example illustrates peptide homing to tumors of mice. At the end of the dosing period in Example 6, mice are frozen in a hexane/dry ice bath and then frozen in a block of carboxymethylcellulose. Whole animal sagittal slices are prepared that resulted in thin frozen sections being available for imaging. Thin, frozen sections of animal including imaging of tissues such as brain, tumor, liver, kidney, lung, heart, spleen, pancreas, muscle, adipose, gall bladder, upper gastrointestinal tract, lower gastrointestinal tract, bone, bone marrow, reproductive track, eye, cartilage, stomach, skin, spinal cord, bladder, salivary gland, and other types of tissues are obtained with a microtome, allowed to desiccate in a freezer, and exposed to phosphoimager plates for about ten days.

[0363] For radiolabeled peptide, these plates are developed, and the signal (densitometry) from each organ is normalized to the signal found in the heart blood of each animal. For detectable agent peptide conjugate, the tissue is imaged with a fluorescence imager or fluorescence microscopy. A signal in tissue stronger than the signal expected from blood that is present in that tissue indicates peptide accumulation in a region, tissue, structure or cell. Alternatively, tissues are harvested, homogenized, and analyzed for peptide content in different tissues, such as by liquid scintillation counting (radiolabeled) or absorbance measurements (detectable agent conjugate).

### Example 8

Peptide Conjugates with Stable Linkers

[0364] This example describes preparation of peptide conjugates with stable linkers. A peptide of the disclosure is expressed recombinantly or chemically synthesized. The peptide is conjugated to a detectable agent or an I/O or any other active agent via a stable linker, such as an amide linkage or a carbamate linkage. The peptide is conjugated using standard 1-ethyl-3-(3-dimethylaminopropyl)carbodiimide (EDC) or dicylcohexylcarbodiimide (DCC) based chemistry or thionyl chloride or phosphorous chloride-based bioconjugation chemistries or other chemistries such as described in this disclosure.

[0365] A peptide and I/O conjugated via a linker are described with the formula Peptide-A-B—C-I/O, wherein the linker is A-B-C. A can be a stable amide link such as that formed by reacting an amine on the peptide with a linker containing a tetrafluorophenyl (TFP) ester or an NHS ester or an ATT (acyl-1,3-thiazolidine-2-thione) group. A can also be a stable carbamate linker such as that formed by reacting an amine on the peptide with an imidazole carbamate active intermediate formed by reaction of CDI with a hydroxyl on the linker. A can also be a stable secondary amine linkage such as that formed by reductive alkylation of the amine on the peptide with an aldehyde or ketone group on the linker. A can also be a stable thioether linker formed using a maleimide or bromoacetamide in the linker with a thiol in the peptide, a triazole linker, a stable oxime linker, or a oxacarboline linker. B is (—CH2—)ₓ— or a short PEG (—CH₂CH₂O—)ₓ (x is 0-20) or other spacers or no spacer. C is an amide bond formed with an amine or a carboxylic acid on the I/O, a thioether formed between a maleimide on the linker and a sulfhydroyl on the I/O, a secondary or tertiary amine, a carbamate, or other stable bonds or is not present beyond the link formed as A. Any linker chemistry described in “Current ADC Linker Chemistry,” Jain et al., Pharm Res, 2015 DOI 10.1007/s11095-015-1657-7 or in “Bioconjugate Techniques” by Greg Hermanson, 3rd edition can be used.

[0366] The resulting peptide conjugates are administered to a human or animal subcutaneously, intravenously, orally, or injected directly into a tumor to treat disease. The peptide is not specifically cleaved from the detectable agent, an I/O, or active agent via a targeted mechanism. The peptide can be degraded by mechanisms such as catabolismreleasing a drug that is modified or not modified form its “native” or initial form (Antibody-Drug Conjugates: Design, Formulation, and Physicochemical Stability, Singh, Luisi, and Pak. Pharm Res (2015) 32:3541-3571). The peptide drug conjugate exerts its pharmacological activity while still intact, or while partially or fully degraded, metabolized, or catabolized.

### Example 9

Peptide Conjugates with Cleavable Linkers

[0367] This example describes preparation of peptide conjugates having cleavable linkers. A peptide of the disclosure is expressed recombinantly or chemically synthesized. A peptide and I/O are conjugated via a linker and is described with the formula Peptide-A-B—C-I/O, wherein the linker is A-B-C. A is a stable amide link such as that formed by reacting an amine on the peptide with a linker containing a tetrafluorophenyl (TFP) ester or an NHS ester or an ATT group. A can also be a stable carbamate linker such as that formed by reacting an amine on the peptide with an imidazole carbamate active intermediate formed by reaction of CDI with a hydroxyl on the linker. A can also be a stable secondary amine linkage such as that formed by reductive alkylation of the amine on the peptide with an aldehyde or ketone group on the linker. A can also be a stable thioether linker formed using a maleimide or bromoacetamide in the linker with a thiol in the peptide, a triazole linker, a stable oxime linker, or a oxacarboline linker. Optionally A is not present as the peptide is directly conjugated via the cleavable link at C. B is (—CH₂—)ₓ— or a short PEG (—CH₂CH₂O—)ₓ (x is 0-20) or other spacers or no spacer. C is an ester bond to the hydroxyl or carboxylic acid on the I/O, or a carbonate, hydrazone, or acylhydrazone, designed for hydrolytic and/or enzymatic cleavage. The rate of cleavage is varied by varying the local environment around the ester, including carbon length (-CH2-)ₓ, steric hindrance (including adjacent side groups such as methyl, ethyl, cyclic), hydrophilicity or hydrophobicity. Hydrolysis rate is affected by local pH, such as lower pH in certain compartments of the body or of the cell such as endosomes and lysosomes or diseased tissues. Alternatively, C is a pH sensitive group such as a hydrazone or oxime linkage. Alternatively, C is a disulfide bond designed to be released by reduction, such as by glutathione. Alternatively, C (or A-B-C) is a peptidic linkage design for cleavable by enzymes. Optionally, a self-immolating group such as pABC is included to cause release of a free unmodified drug upon cleavage (Antibody-Drug Conjugates: Design, Formulation, and Physicochemical Stability, Singh, Luisi, and Pak. Pharm Res (2015) 32:3541-3571). The linker is cleaved by enzymes such as esterases, matrix metalloproteinases, cathepsins such as cathepsin B, glucuronidases, a protease, or thrombin. Alternatively, the bond designed for cleavage is at A, rather than C, and C could be a stable bond or a cleavable bond. An alternative design is to have stable linkers (such as amide or carbamate) at A and C and have a cleavable linker in B, such as a disulfide bond. The rate of reduction is modulated by local effects such as steric hindrance from methyl or ethyl groups or modulating hydrophobicity/hydrophilicity.

[0368] The resulting peptide conjugates are administered to a human or animal subcutaneously, intravenously, orally, or injected directly into a tumor to treat disease.

### Example 10

### Installation of a Thiol Group, an Amine Group, or an Aldehyde Group in RNA or DNA

[0369] This example describes incorporation of a thiol group, an amine group, or an aldehyde group in RNA or DNA. FIG. 1 illustrates incorporation or addition of these groups on RNA or DNA. A thiol group is added on RNA or DNA, for example on a RIG-I ligand or an MDA5 ligand, using EDC and imidazole to activate the 5′ phosphate group to a phosphorylimidazolide, and by subsequently reacting the resulting product with cystamine. This is followed by reduction with dithiothreitol (DTT) to form a phosphoramidite linkage to a free thiol group. A thiol group is, alternatively, added on RNA or DNA by incorporating a phosphoramidite that contains a thiol during solid-phase phosphoramidite oligonucleotide synthesis, at either the 5′-end or the 3′-end of the oligonucleotide as shown in FIG. 1. The phosphoramidite used during synthesis can have a protecting group on the thiol during synthesis that is removed during cleavage, purification, and workup. FIG. 1A illustrates structures of oligonucleotides containing a 5′-thiol (thiohexyl; C6) modification (left), and a 3′-thiol (C3) modification (right), as shown at https://www.atdbio.com/content/50/Thiol-modified-oligonucleotides.

[0370] An amine group is added on RNA or DNA by incorporating a phosphoramidite during synthesis that contains a protected amino group that is later deprotected. FIG. 1B illustrates an MMT-hexylaminolinker phosphoramidite. FIG. 1C illustrates a TFA-pentylaminolinker phosphoramidite, as shown at https://www.sigmaaldrich.com/catalog/product/sigma/m01023hh?lang=en&region=US.

[0371] Alternatively, thiol or amine containing oligonucleotide residues are included within the sequence at any chosen location in RNA or DNA, such as described by Jin et al. (J Org Chem. 2005 May 27;70(11):4284-99). FIG. 1D illustrates RNA residues incorporating amine or thiol residues, as presented in Jin et al. (J Org Chem. 2005 May 27;70(11):4284-99). Also, an oligonucleotide residue that contains a phosphorothioate group within the phosphodiester backbone (where a sulfur atom replaces a non-bridging oxygen in the phosphate backbone of the oligonucleotide) provides a reactive group that is similarly used for conjugation to a thiol group. Use of the phosphorothioate containing residues can also make the RNA more resistant to nuclease degradation.

[0372] FIG. 1E illustrates oligonucleotides with aminohexyl modifications at the 5′ (left) and 3′ ends (right).

[0373] Aldehyde functional groups can be incorporated at the 3′ end of RNA by using periodate oxidation to convert the diol into two aldehyde groups.

[0374] Other methods of incorporating or modifying functional groups are carried out using techniques set forth in Bioconjugate Techniques, by Greg Hermanson, 3rd edition.

### Example 11

### Incorporation of a Carboxylate Group, a Thiol Group, or an Amine Group on Cyclic Dinucleotide

[0375] This example describes incoproration of a carboxylate group, a thiol group, or an amine group on cyclic dinucleotides. The cyclic dinucleotides serves as a STING ligand, which is an I/O of the present disclosure that is coupled to any one of peptides of SEQ ID NO: 1-SEQ ID NO: 1134, SEQ ID NO: 1243-SEQ ID NO: 1262, or SEQ ID NO: 1263-SEQ ID NO: 1316.

[0376] A hydroxyl group in a cyclic dinucleotide is reacted with chloroacetic acid to form a carboxylate. The carboxylate is converted into an amine group by subsequent reaction with a diamine, such as ethylene diamine, using EDC. Alternatively, the carboxylate is converted into a thiol group by subsequent reaction with cystamine, using EDC. This is followed by reduction, for example, with dithiothreitol (DTT). The resulting cyclic dinucleotide is ready for couple to any peptide of the instant disclosure and is administered to agonize STING.

[0377] Alternatively, a STING ligand comprising bis-phosphorothioate linkages in the cyclic phosphodiester provides reactive thiols that can be used as the I/O in the peptide-I/O complex. These thiols are reacted with maleimide, bromoacetyl, iodoacetyl, or pyridyldithiol groups (FIG. 12A).

[0378] Alternatively, the C-8 position on the 5 member ring of a purine base within a CDN can be brominated with N-bromosuccinimide (NBS) to provide a reactive bromine group. The reactive bromine group is then coupled with an amine-containing group containing a functional group, such as a thiol, or a protected amine that is available for further coupling (FIG. 12B).

[0379] One or two functional groups are incorporated on the cyclic dinucleotide by, for example, having one or two phosphorothiolate linkages in the structure or having one or two guanosines (as adenosine will be less reactive with NBS).

### Example 12

Generation of Cleavable Linkers Between RNA, DNA, or a Cyclic Dinucleotide with a Peptide

[0380] This example describes generation of cleavable linkers between RNA, DNA, or a cyclic dinucleotide with any one of peptides of SEQ ID NO: 1-SEQ ID NO: 1134, SEQ ID NO: 1243-SEQ ID NO: 1262, or SEQ ID NO: 1263-SEQ ID NO: 1316. A disulfide linker is generated by combining a thiol-containing RNA/DNA/cyclic dinucleotide with a peptide comprising a free thiol group. The thiol is incorproated on the peptide using Traut's reagent, SATA, SPDP or other appropriate reagents on a reactive amine (such as a heterobifunctional SPDP and NHS ester linker with the N-terminus or a lysine residue), or by incorproating a free cysteine residue in the peptide (FIG. 13). The disulfide linker is cleaved in the reducing environment of the cytoplasm or in the endosomal/lysosomal pathway.

[0381] An ester linkage is generated by combining a free hydroxyl group (such as on the 3′ end of an RNA or DNA, or on a ribose unit within a cyclic dinucleotide) with a carboxylic acid group on the peptide (such as from the C-terminus, an aspartic acid, glutamic acid residue, or introduced via a linker to a lysine residue or the N-terminus) such as via Fisher esterification or via use of an acyl chloride. The ester linker is cleaved by hydrolysis, which is accelerated by the lower pH of endosomes and lysosomes, or by enzymatic esterase cleavage.

[0382] An oxime or hydrazone linkage is generated by combining an aldehyde group on the RNA/DNA/cyclic dinucleotide with a peptide that has been functionalized with an aminooxy group (to form an oxime linkage) or a hydrazide group (to form a hydrazone linkage). The stability or lability of an oxime or hydrazone linkage is tailored by neighboring groups (Kalia et al., Angew Chem Int Ed Engl. 2008; 47(39):7523-6.), and hydrolytic cleavage is accelerated in acidic compartments such as the endosome/lysosome.

[0383] A hydrazide group is incorporated on a peptide by reacting adipic acid dihydrazide or carbohydrazide with carboxylic acid groups in the C-terminus or in aspartic or glutamic acid residues. An aminooxy group is incorporated on a peptide by reacting the N-terminus or a lysine residue with a heterobifunctional molecule containing an NHS ester on one end and a phthalimidoxy group on the other end, followed by cleavage with hydrazine. The reaction is, optionally, catalyzed by addition of aniline.

[0384] The cleavage rate of any linker is tuned, for example, by modifying the electron density in the vicinity of the cleavable link or by sterically affecting access to the cleavage site (e.g., by adding bulky groups, such as methyl groups, ethyl groups, or cyclic groups).

[0385] Cleavable linkers are, alternatively, generated using methods set forth in Bioconjugate Techniques, by Greg Hermanson, 3rd edition.

[0386] Installation of a thiol, amine, or aldehyde groups in RNA or DNA, as a functional handle, is carried out as described above in Example 10. Installation of a carboxylate, thiol, or amine groups in cyclic dinucleotides, as a functional handle, is carried out as described above in Example 11.

[0387] Exemplary peptide-RNA conjugates are given in FIG. 34-FIG. 35 and FIG. 39-FIG. 44.

[0388] FIG. 34 illustrates a peptide-I/O complex comprising a peptide of SEQ ID NO: 568 and an I/O comprising a dsRNA (SEQ ID NO: 1371), linked together by a disulfide cleavable linker, where the linker is attached to a modified base in the dsRNA used as a conjugation or linkage site (e.g., as shown in the FIG. a uridine in SEQ ID NO: 1371 is modified to be uridine with an extended amine attached to the linker, which linkeris also attached to the peptide [as denoted]). Note the dsRNA of SEQ ID NO: 1371 in this peptide-I/O complex has a 5′ppp (triphosphate) and is formed as a hairpin structure. FIG. 35 illustrates the cleavage product of a peptide of the peptide-I/O complex of FIG. 34.

[0389] FIG. 39 illustrates a peptide-I/O complex comprising a peptide of SEQ ID NO: 569 and an I/O comprising a dsRNA (SEQ ID NO: 1371), linked together by a hydrazone/PEG linker, where the linker is attached to a modified base in the dsRNA used as a conjugation or linkage site (e.g., as shown in the figure, a guanosine in SEQ ID NO: 1371 is a modified guanosine attached to the linker, and the linker is also attached to the peptide (as denoted)). The dsRNA of SEQ ID NO: 1371 in this peptide-I/O complex has a 5′ppp (triphosphate) and is formed as a hairpin structure. FIG. 40 illustrates a peptide-I/O complex comprising a peptide of SEQ ID NO: 569 and an I/O comprising a dsRNA (SEQ ID NO: 1371), linked together by a disulfide/PEG linker, where the linker is attached to a modified base in the dsRNA used as a conjugation or linkage site (e.g., as shown in the figure, a guanosine in SEQ ID NO: 1371 is a modified guanosine attached to the linker, and the linker is also attached to the peptide (as denoted)). The dsRNA of SEQ ID NO: 1371 in this peptide-I/O complex has a 5′ppp (triphosphate) and is formed as a hairpin structure. FIG. 41 illustrates a peptide-I/O complex comprising a peptide of SEQ ID NO: 569 conjugated to an ICG dye and an I/O comprising a dsRNA (SEQ ID NO: 1371), linked together by a disulfide/PEG linker, where the linker is attached to a modified base in the dsRNA used as a conjugation or linkage site (e.g., as shown in the figure, a guanosine in SEQ ID NO: 1371 is a modified guanosine attached to the linker, and the linker is also attached to the peptide (as denoted)). The dsRNA of SEQ ID NO: 1371 in this peptide-I/O complex has a 5′ppp (triphosphate) and is formed as a hairpin structure. FIG. 42 illsutrates a peptide-I/O complex comprising a peptide of SEQ ID NO: 569 and an I/O comprising a dsRNA (SEQ ID NO: 1371), linked together by a hydrazone linker, where the linker is attached to a modified base in the dsRNA used as a conjugation or linkage site (e.g., as shown in the figure, a guanosine in SEQ ID NO: 1371 is a modified guanosine attached to the linker, and the linker is also attached to the peptide (as denoted). The dsRNA of SEQ ID NO: 1371 in this peptide-I/O complex has a 5′ppp (triphosphate) and is formed as a hairpin structure. FIG. 43 illustrates a peptide-I/O complex comprising a peptide of SEQ ID NO: 569 and an I/O comprising a dsRNA (SEQ ID NO: 1371), linked together by a long disulfide linker, where the linker is attached to a modified base in the dsRNA used as a conjugation or linkage site (e.g., as shown in the figure, a guanosine in SEQ ID NO: 1371 is a modified guanosine attached to the linker, and the linker is also attached to the peptide (as denoted)). The dsRNA of SEQ ID NO: 1371 in this peptide-I/O complex has a 5′ppp (triphosphate) and is formed as a hairpin structure. FIG. 44 illustrates a peptide-I/O complex comprising a peptide of SEQ ID NO: 569 and an I/O comprising a dsRNA (SEQ ID NO: 1371), linked together by a short disulfide linker, where the linker is attached to a modified base in the dsRNA used as a conjugation or linkage site (e.g., as shown in the figure, a guanosine in SEQ ID NO: 1371 is a modified guanosine attached to the linker, which linkeris also attached to the peptide (as denoted)). The dsRNA of SEQ ID NO: 1371 in this peptide-I/O complex has a 5′ppp (triphosphate) and is formed as a hairpin structure.

[0390] A peptide-I/O complex of FIG. 34 was generated synthetically, purified, and the mass was verified by MALDI-TOF MS and purity was measured by RP-HPLC.

### Example 13

Generation of Stable Linkers Between RNA, DNA, or a Cyclic Dinucleotide with a Peptide

[0391] This example describes generation of a stable linkers between RNA, DNA, or a cyclic dinucleotide, such as RIG-I ligands or STING ligands, with any one of peptides of SEQ ID NO: 1-SEQ ID NO: 1134, SEQ ID NO: 1243-SEQ ID NO: 1262, or SEQ ID NO: 1263-SEQ ID NO: 1316. A stable linker through a secondary amine is generated by reductive amination, achieved by combining an aldehyde-containing RNA, DNA, or cyclic dinucleotide with the amine at the N-terminus of a peptide or in a lysine residue, followed by reduction with sodium cyanoborohydride.

[0392] A stable amide linkage is generated by combining an amine group on an RNA, DNA, or cyclic dinucleotide with the carboxylate at the C-terminus of a peptide or in an aspartic acid or glutamic acid residues.

[0393] A stable carbamate linkage is generated by activating a hydroxyl group in an RNA, DNA, or cyclic dinucleotide with carbonyldiimidazole (CDI) or N,N′-disuccinimidyl carbonate (DSC) and subsequently reacted with a peptide's N-terminus or lysine residue.

[0394] A maleimide linker is created by combining a thiol-containing RNA, DNA, or cyclic dinucleotide with a maleimide functionalized peptide. The peptide is functionalized using an NHS-X-maleimide heterobifunctional agent on a reactive amine in the peptide, wherein X is any linker. A maleimide linker is used as a stable linker or as a slowly cleavable linker, which is cleaved by exchange with other thiol-containing molecules in biological fluids. The maleimide linker is also stabilized by hydrolyzing the succinimide moiety of the linker using various substituents, including those described in Fontaine et al., Bioconjugate Chem., 2015, 26 (1), pp 145-152.

[0395] Other methods of incorporating, adding, or modifying functional groups in polynucleotides, for example, are carried out using techniques set forth in Bioconjugate Techniques, by Greg Hermanson, 3rd edition.

[0396] Installation of a thiol, amine, or aldehyde groups in RNA or DNA, as a functional handle, is carried out as described above in Example 10. Installation of a carboxylate, thiol, or amine groups in cyclic dinucleotides, as a functional handle, is carried out as described above in Example 11.

[0397] Exemplary stable peptide-I/O complexes comprising RNA I/Os are shown in FIG. 36-FIG. 38. The peptide-I/O complexes shown in FIG. 36-FIG. 38 were generated synthetically and purified. Their masses were verified by MALDI-TOF MS and purity was measured by RP-HPLC. FIG. 36 illustrates a peptide-I/O complex comprising a peptide of SEQ ID NO: 568 and an I/O comprising a dsRNA (SEQ ID NO: 1371), linked together by an extended stable linker, where the linker is attached to a modified base in the dsRNA used as a conjugation or linkage site (e.g., as shown in the figure, a uridine in SEQ ID NO: 1371 is modified to be uridine with an extended amine attached to the linker, and the linker is also attached to the peptide (as denoted)). The dsRNA of SEQ ID NO: 1371 in this peptide-I/O complex has a 5′ppp (triphosphate) and is formed as a hairpin structure. FIG. 37 illustrates a peptide-I/O complex comprising a peptide of SEQ ID NO: 569 and an I/O comprising a dsRNA (SEQ ID NO: 1371), linked together by an extended stable linker, where the linker is attached to a modified base in the dsRNA used as a conjugation or linkage site (e.g., as shown in the figure, a uridine in SEQ ID NO: 1371 is modified to be uridine with an extended amine attached to the linker, and the linker is also attached to the peptide (as denoted)). The dsRNA of SEQ ID NO: 1371 in this peptide-I/O complex has a 5′ppp (triphosphate) and is formed as a hairpin structure. FIG. 38 illustrates a peptide-I/O complex comprising a peptide of SEQ ID NO: 569 conjugated to an ICG dye (see the peptide complex of FIG. 27) and an I/O comprising a dsRNA (SEQ ID NO:1371), linked together with an extended stable linker, where the linker is attached to a modified base in the dsRNA used as a conjugation or linkage site (e.g., as shown in the figure, a uridine in SEQ ID NO: 1371 is modified to be uridine with an extended amine attached to the linker, and the linker is also attached to the peptide (as denoted)). The dsRNA of SEQ ID NO: 1371 in this peptide-I/O complex has a 5′ppp (triphosphate) and is formed as a hairpin structure.

### Example 14

### Generation of a Boronic Ester Linkage Between RNA and Peptide

[0398] This example describes generation of a boronic ester linkage between RNA, such as a RIG-I ligand or an MDA5 ligand, and any one of peptides of SEQ ID NO: 1-SEQ ID NO: 1134, SEQ ID NO: 1243-SEQ ID NO: 1262, or SEQ ID NO: 1263-SEQ ID NO: 1316. Phenylboronic acids (PBAs) form reversible covalent complexes with cis diols. A cleavable linker is formed by creating a covalent complex between the diol on the 3′ end of RNA and a PBA-containing peptide. A PBA group is incorporated on a peptide by reacting 4-formyl-PBA with the N-terminus or a lysine in a peptide via reductive amination. The pKa of the PBA is modulated by neighboring groups (e.g., amines) to lower the pKa to ˜6, allowing complexation at neutral pH and release at lower pH. (Aguirre-Chagala et al., ACS Macro Lett., 2014, 3 (12), U.S. Plant Pat. No. 1,249-1253; Winblade et al., Biomacromolecules. 2000 Winter; 1(4):523-33; Roy et al., ACS Macro Lett., 2012, 1 (5), pp 529-532; Gennari et al., Bioconjugate Chem., 2017, 28 (5), U.S. Plant Pat. No. 1,391-1402). A boronic ester linkage is cleaved by the lower pH environment of the endosome/lysosome. After cleavage, the RNA is released in its unmodified form, resulting in traceless delivery of the RNA.

### Example 15

[0399] Generation of an Enzyme Cleavable Linkage between RNA, DNA, or a Cyclic Dinucleotide with a Peptide

[0400] This example describes generation of an enzyme cleavable linkage between RNA, DNA, or a cyclic dinucleotide, such as a RIG-I ligand or a STING ligand, and any one of peptides of SEQ ID NO: 1-SEQ ID NO: 1134, SEQ ID NO: 1243-SEQ ID NO: 1262, or SEQ ID NO: 1263-SEQ ID NO: 1316. An enzymatically cleavable linkage is generated between an RNA, DNA, or a cyclic dinucleotide and a peptide. The conjugate with a cleavable linkage is administered in vitro or in vivo and is cleaved by enzymes in the cells or body, releasing the RNA, DNA, or cyclic dinucleotide. The enzyme is present in the endosome/lysome, the cytosol, the cell surface, or is upregulated in the tumor microenvironment. These enzymes include, but are not limited to, cathepsins (such as all those listed in Kramer et al., Trends Pharmacol Sci. 2017 October;38(10):873-898) such as cathepsin B, glucoronidases including beta-glucuronidase, hyaluronidase and matrix metalloproteases, such as MMP-1, 2, 7, 9, 13, or 14 (Kessenbrock et al., Cell. 2010 Apr. 2; 141(1): 52-67). Cathepsin or MMPs cleave amino acid sequences of any one of SEQ ID NO: 1139-SEQ ID NO: 1161, SEQ ID NO: 1360-SEQ ID NO: 1363 and SEQ ID NO: 1365 shown below in TABLE 9 (see also Nagase, Hideaki. “Substrate specificity of MMPs.” Matrix Metalloproteinase Inhibitors in Cancer Therapy. Humana Press, 2001. 39-66; Dal Corso et al., Bioconjugate Chem., 2017, 28 (7), U.S. Plant Pat. No. 1,826-1833; Dal Corso et al., Chemistry-A European Journal 21.18 (2015): 6921-6929; Doronina et al., Bioconjug Chem. 2008 October; 19(10): 1960-3.). Glucuronidase linkers include any one of those described in Jeffrey et al., Bioconjugate Chem., 2006, 17 (3), pp 831-840.

TABLE 9
Enzymatically Cleavable Linkers

| | | Cleaved |
|---|---|---|
| SEQ ID NO | Sequence | By |
| SEQ ID NO: 1139 | Val-Ala | Cathepsin |
| SEQ ID NO: 1140 | Val-Lys | Cathepsin |
| SEQ ID NO: 1141 | Val-Arg | Cathepsin |
| SEQ ID NO: 1142 | Val-Cit | Cathepsin |
| SEQ ID NO: 1143 | Phe-Lys | Cathepsin |
| SEQ ID NO: 1144 | Met-Lys | Cathepsin |
| SEQ ID NO: 1145 | Asn-Lys | Cathepsin |
| SEQ ID NO: 1146 | Ile-Pro | Cathepsin |
| SEQ ID NO: 1147 | Gly-Ile | MMP |
| SEQ ID NO: 1148 | Gly-Leu | MMP |
| SEQ ID NO: 1149 | Gly-Tyr | MMP |
| SEQ ID NO: 1150 | Gly-Met | MMP |
| SEQ ID NO: 1151 | Met-Ile | MMP |
| SEQ ID NO: 1152 | Ala-Ile | MMP |
| SEQ ID NO: 1153 | Pro-Ile | MMP |
| SEQ ID NO: 1154 | Gly-Pro-Gln-Gly- | MMP |
| | Ile-Ala-Gly-Gln | |
| SEQ ID NO: 1155 | Gly-Pro-Gln-Gly- | MMP |
| | Ile-Phe-Gly-Gln | |
| SEQ ID NO: 1156 | Gly-Pro-Gln-Gly- | MMP |
| | Ile-Trp-Gly-Gln | |
| SEQ ID NO: 1157 | Gly-Pro-Gln-Gly- | MMP |
| | Ile-Leu-Gly-Gln | |
| SEQ ID NO: 1158 | Gly-Pro-Gln-Gly- | MMP |
| | Ile-Arg-Gly-Gln | |
| SEQ ID NO: 1159 | Gly-Pro-Leu-Gly- | MMP |
| | Ile-Ala-Gly-Gln | |
| SEQ ID NO: 1160 | Gly-Pro-Met-Gly- | MMP |
| | Ile-Ala-Gly-Gln | |
| SEQ ID NO: 1161 | Gly-Pro-Tyr-Gly- | MMP |
| | Ile-Ala-Gly-Gln | |
| SEQ ID NO: 1360 | GSVAGS | |
| SEQ ID NO: 1361 | GGGGSVAGGGGS | |
| SEQ ID NO: 1362 | GGGGSGGGGSV | |
| | AGGGGSGGGGS | |
| SEQ ID NO: 1363 | GGGGSGGGGSPLG | |
| | LAGGGGGSGGGGS | |
| SEQ ID NO: 1365 | AEAAAKEAAAKAV | |
| | AAEAAAKEAAAKA | |

[0401] A Val-Cit-PABC enzymatically cleavable linker, such as described in Jain et al., Pharm Res. 2015 November; 32(11):3526-40., is created by conjugating the PABC end to an amine group on the RNA, DNA, or cyclic dinucleotide. The valine end is further linked to the peptide, for example, by generating an amide bond to the C-terminus of the peptide. A spacer on either side of the molecule is optionally incorporated in order to facilitate steric access of the enzyme to the Val-Cit linkage (SEQ ID NO: 1142). The linkage to the peptide is, alternatively, generated by activating the N-terminus of the peptide with SATA and creating a thiol group, which is subsequently reacted to a maleimidocaproyl group attached to the N-terminus of the Val-Cit pair (SEQ ID NO: 1142). Upon cleavage by cathepsin B, the self-immolative PABC group spontaneously eliminates, releasing the amine-containing RNA, DNA, or cyclic dinucleotide with no further chemical modifications. Other amino acid pairs include Glu-Glu, Glu-Gly, and Gly-Phe-Leu-Gly (SEQ ID NO: 1497).

[0402] Installation of a thiol, amine, or aldehyde groups in RNA or DNA, as a functional handle, is carried out as described above in Example 10. Installation of a carboxylate, thiol, or amine groups in cyclic dinucleotides, as a functional handle, is carried out as described above in Example 11.

### Example 16

### Conjugation of a RIG-I Ligand and a Peptide

[0403] This example describes conjugation of a RIG-I ligand to a peptide of the present disclosure. The peptide is SEQ ID NO: 2 or SEQ ID NO: 569 (SEQ ID NO: 2 without N-terminal GS). The RIG-I ligand shown in FIG. 2 and is synthesized using 2′-fluoropyrimidines to increase backbone stability. The Lys27 residue of SEQ ID NO: 569 (at position 29 in SEQ ID NO: 2) is conjugated via reductive amination to 4-formyl-PBA. The PBA-containing peptide is complexed to the 3′ diol group of the RIG-I ligand to form a boronate ester.

[0404] Alternatively, the RIG-I ligand made with 2′-fluoropyrimidines has a thiol-containing or phosphorothiolate-containing nucleotide residue included in the sequence, during synthesis, distal to the 5′ppp, such as at least 10 base pairs away. Lys27 in SEQ ID NO: 569 (or Lys residue 29 in SEQ ID NO: 2) is modified with SATA(with subsequent deprotection using hydroxylamine) to form a thiol group.

[0405] Alternatively, Lys27 in SEQ ID NO: 569 (or Lys residue 29 in SEQ ID NO: 2) is modified with SPDP-PEG+-NHS ester to form a protected thiol group, with a flexibile hydrophilic PEG spacer. The two thiol groups in the modified RIG-I ligand and SEQ ID NO: 569 are combined to form a cleavable disulfide bond. Alternatively, Lys27 in SEQ ID NO: 569 (or Lys residue 29 in SEQ ID NO: 2) is modified with bromoacetamido-PEG4-TFP ester to form an amide bond, and then reacted with the thiol group within the RIG-I ligand made with 2′-fluoropyrimidines, to form a stable thioether bond.

[0406] Alternatively, the RIG-I ligand made with 2′-fluoropyrimidines has an amine-containing nucleotide included in the sequence, during synthesis, distal to the 5′ppp. Lys27 in SEQ ID NO: 569 (at position 29 in SEQ ID NO: 2) is modified with SATA to form a thiol group. A maleimidocaproyl-Val-Cit-PABC linker is conjugated to the amine in the RIG-I ligand and to the thiol in SEQ ID NO: 2 or SEQ ID NO: 569.

[0407] Alternatively, the RIG-I ligand made with 2′-fluoropyrimidines is conjugated to Lys27 of SEQ ID NO: 569 (at position 29 in SEQ ID NO: 2) via reductive amination after oxidation of the 3′ diols to form a secondary amine conjugate.

[0408] Alternatively, the RIG-I ligand made with 2′-fluoropyrimidines has the 3′ end oxidized to aldehydes via periodate oxidation. The aldehyde is then reacted with the peptide of SEQ ID NO: 2, which is functionalized with an aminooxy group on the N-terminus to form a cleavable oxime bond.

[0409] Alternatively, the RIG-I ligand of SEQ ID NO: 1180 (sense) and SEQ ID NO: 1181 (antisense) is used using 2′-fluoropyrimidines to increase backbone stability. The 3′ end of the sense strand is synthesized with a thiol modification as shown in FIG. 1. Lys27 in SEQ ID NO: 569 (or Lys residue 29 in SEQ ID NO: 2) is modified with bromoacetamido-PEG4-TFP ester to form an amide bond, and then reacted with the thiol group within the RIG-I ligand to form a stable thioether bond. Alternatively the 5′ end of the sense strand or amino terminated nucleotides serves as the site of modification.

[0410] Alternatively, the peptide is any one of SEQ ID NO: 1-SEQ ID NO: 1134, SEQ ID NO: 1243-SEQ ID NO: 1262, or SEQ ID NO: 1263-SEQ ID NO: 1316.

[0411] Installation of a thiol, amine, or aldehyde groups in RNA or DNA, as a functional handle, is carried out as described above in Example 10. Installation of a carboxylate, thiol, or amine groups in cyclic dinucleotides, as a functional handle, is carried out as described above in Example 11.

### Example 17

### Conjugation of a Cyclic Dinucleotide and a Peptide

[0412] This example describes conjugation of a cyclic dinucleotide to a peptide of the present disclosure. The peptide is SEQ ID NO: 2 or SEQ ID NO: 569 (SEQ ID NO: 2 without N-terminal GS). A hydroxyl group in 2′3′ cGAMP is used to form an ester linkage with SEQ ID NO: 2 or SEQ ID NO: 569 by reacting the hydroxyl group with glutaric anhydride, subsequently making the NHS glutaric ester of the modified 2′3′ cGAMP, followed by reaction with the amine in Lys27 of SEQ ID NO: 569 (at position 29 in SEQ ID NO: 2).

[0413] Alternatively, maleimidocaproyl-Val-Cit-PABC linker is conjugated to an amine in 2′3′ cGAMP and to a thiol group in SEQ ID NO: 2 or SEQ ID NO: 569 (where Lys 27 (SEQ ID NO: 569) or Lys 29 (SEQ ID NO: 2) is reacted with SATA to form a thiol group).

[0414] Alternatively, a hydroxyl group in 2′3′ cGAMP is used to form a carbamate linkage with SEQ ID NO: 2 or SEQ ID NO: 569 by activating the hydroxyl with DSC, and then reacting the resulting compound with the Lys27 residue of SEQ ID NO: 569 (at position 29 in SEQ ID NO: 2).

[0415] Alternatively, a cyclic dinucleotide from TABLE 8 comprising a phosphorothioate, such as ML-RR-S2-CDA, is used. Lys27 in SEQ ID NO: 569 (or Lys residue 29 in SEQ ID NO: 2) is modified with SPDP-PEG8-NHS ester to form an amide bond, and then reacted with the phosphorothiolate group in the cyclic dinucleotide to form a cleavable disulfide bond.

[0416] Alternatively, a fusion product comprising one or more stable spacer peptides (such as any one of SEQ ID NO: 1164-SEQ ID NO: 1172), and/or an enzymatically cleavable peptide (such as any one of SEQ ID NO: 1139-SEQ ID NO: 1161, SEQ ID NO: 1360-SEQ ID NO: 1363 and SEQ ID NO: 1365), and a a peptide of this dislcosure, such as SEQ ID NO: 1170, SEQ NO: 1139, or SEQ ID NO: 2. This fusion product is functionalized with a bromoacetyl group on the N-terminus and the bromo group is reacted with the phosphorothiolate group in the cyclic dinucleotide to form an enzymatically cleavable linkage.

[0417] Alternatively, the C8 of guanosine of 2′3′ cGAMP is brominated with NBS and reacted with cystamine and reduce to make a thiol. Lys27 in SEQ ID NO: 569 (or Lys residue 29 in SEQ ID NO: 2) is modified with SPDP-PEG4-NHS ester to form an amide bond and reacted with the thiol group to form a cleavable disulfide bond.

[0418] Alternatively, the C8 of guanosine of 2′3′ cGAMP is brominated with NBS. This is reacted with the N-terminus of a fusion product comprising one or more stable spacer peptides (such as any one of SEQ ID NO: 1163-SEQ ID NO: 1172 or any one of SEQ ID NO: 1359, SEQ ID NO: 1364, SEQ ID NO: 1366), and/or an enzymatically cleavable peptide (such as any one of SEQ ID NO: 1139-SEQ ID NO: 1161, SEQ ID NO: 1360-SEQ ID NO: 1363 and SEQ ID NO: 1365), and a peptide of this disclosure, such as SEQ NO: 1139, SEQ ID NO: 1170, and SEQ ID NO: 2.

[0419] Alternatively, the peptide is any one of SEQ ID NO: 1-SEQ ID NO: 1134, SEQ ID NO: 1243-SEQ ID NO: 1262, or SEQ ID NO: 1263-SEQ ID NO: 1316.

[0420] Installation of a thiol, amine, or aldehyde groups in RNA or DNA, as a functional handle, is carried out as described above in Example 10. Installation of a carboxylate, thiol, or amine groups in cyclic dinucleotides, as a functional handle, is carried out as described above in Example 11.

### Example 18

[0421] Expression of an IL-15 Hyperagonist Fused with a Tumor Homing and/or Cell Penetrating Peptide

[0422] This example describes expression and purification of an IL-15 agent comprising an IL-15 hyperagonist, fused to any tumor homing and/or cell penetrating peptide of this disclosure, such as any one of SEQ ID NO: 1-SEQ ID NO: 1134, SEQ ID NO: 1243-SEQ ID NO: 1262, or SEQ ID NO: 1263-SEQ ID NO: 1316. The peptide is fused to the N-terminus or the C-terminus of the IL-15 hyperagonist. The IL-15 hyperagonist is comprised of IL-15Rα, a linker, and IL-15 (referred to as an exemplary “RLI” from the N to C-terminus direction; SEQ ID NO: 1135), or is comprised of IL-15, a linker, and IL-15Rα (referred to as an exemplary ″ILR). Examples of IL-15 hyperagonists are shown in TABLE 3. The IL-15 hyperagonist and the peptide are linked via an enzymatically cleavable linker, such as a linker cleaved by cathepsins or MMP. The enzymatically cleavable linker is any one of SEQ ID NO: 1139-SEQ ID NO: 1161, SEQ ID NO: 1360-SEQ ID NO: 1363 and SEQ ID NO: 1365. Alternatively, or in addition, the IL-15 hyperagonist and the peptide are linked via a stable linker, such as a linker of any one of SEQ ID NO: 1163-SEQ ID NO: 1168, as shown below in TABLE 10 or other stable linkers. A tag useful for labeling or purification, such as FLAG, is optionally added to the fusion. Said tag can be linked with a linker that is enzymatically cleaved after purification, such as “Xa.” A FLAG-Xa (DYKDDDDKIEGR) tag is shown in SEQ ID NO: 1162.

[0423] The peptide can be a peptide of SEQ ID NO: 1, SEQ ID NO: 2, SEQ ID NO: 568, or SEQ ID NO: 569, or any peptide that is 80%, 85%, 90%, 95%, 96%, 97%, 98%, 99% or more identical to any of the foregoing. From the N-terminus to the C-terminus, an example fusion peptide with an enzymatically cleavable linker is (1) SEQ ID NO: 1135 or SEQ ID NO: 1136, (2) SEQ ID NO: 1170, (3) SEQ ID NO: 1139 or SEQ ID NO: 1147, and (4) SEQ ID NO: 1. From the N-terminus to the C-terminus, an example fusion peptide with a stable linker is (1) SEQ ID NO: 1135 or SEQ ID NO: 1136, (2) SEQ ID NO: 1170, and (3) SEQ ID NO: 1.

TABLE 10
Stable Linkers

| SEQ ID NO | Sequence |
|---|---|
| SEQ ID NO: 1163 | GGSGGGGSGGGSGGGGSLQ |
| SEQ ID NO: 1164 | GGSGGGGSGGGSGGGGS |
| SEQ ID NO: 1165 | SGGGSGGGGSGGGGSGGGGSGGGSLQ |
| SEQ ID NO: 1166 | SGGGSGGGGSGGGGSGGGGSGGGS |
| SEQ ID NO: 1167 | (GGGGS)x; where x = 1-10 |
| SEQ ID NO: 1168 | GS |
| SEQ ID NO: 1169 | SGGSGGGGSGGGSGGGGSLQ |
| SEQ ID NO: 1170 | GGGS |
| SEQ ID NO: 1171 | GGGSGGGS |
| SEQ ID NO: 1172 | (GGGS)x; where x = 1-10 |
| SEQ ID NO: 1359 | GGGGSGGGGSGGGGS |
| SEQ ID NO: 1364 | AEAAAKEAAAKEAAAKA |
| SEQ ID NO: 1366 | SGGSGGGGSGGGGSGGGGSGGGSLQ |

[0424] The peptide-protein fusion is expressed recombinantly in cells or in a cell-free system using standard molecular biology techniques, such as those described in M.R. Green, Joseph Sambrook. Molecular Cloning. 2012 Cold Spring Harbor Press. For instance, DNA is synthesized that encodes for the designed polypeptide, as well as a leader peptide and other elements necessary for expression. The construct is inserted into an expression vector, which is recombined in a virus used to transfect cells, such as CHO mammalian cells or SF9 insect cells. The protein is expressed and purified. Alternatively, the IL15 hyperagonist is chemically conjugated to the tumor homing and/or cell penetrating peptide, using bioconjugate chemistries described in Bioconjugate Techniques by Hermanson.

[0425] Other peptide-I/O complexes can similarly exhibit tumor homing, such as peptide-IL-15 agent complexes containing an IL-15 agent such as L₀-X-L₁-Y-L₂, wherein L₁ can be SEQ ID NO: 1169 or SEQ ID NO: 1163, X can be SEQ ID NO: 1176 or SEQ ID NO: 1179, and Y can be SEQ ID NO: 1177, SEQ ID NO: 1178, in any combination. In addition, peptide-IL-15 agent complexes can comprise any of the complexes of TABLE 4.

### Example 19

Expression of a 4-1BB Ligand Fused with a Tumor Homing and/or Cell Penetrating Peptide

[0426] This example describes expression of a 4-1BB ligand fused to any tumor homing and/or cell penetrating peptide of this disclosure, such as any one of SEQ ID NO: 1-SEQ ID NO: 1134, SEQ ID NO: 1243-SEQ ID NO: 1262, or SEQ ID NO: 1263-SEQ ID NO: 1316. The peptide is fused to the N-terminus or the C-terminus of the 4-1BB ligand. Examples of 4-1BB ligands are shown in TABLE 5. The 4-1BB ligand and the peptide are linked via an enzymatically cleavable linker, such as a linker cleaved by cathepsins or MMP. The enzymatically cleavable linker is any one of SEQ ID NO: 1139-SEQ ID NO: 1161, SEQ ID NO: 1360-SEQ ID NO: 1363 and SEQ ID NO: 1365. Alternatively, the 4-1BB ligand and the peptide are linked via a stable linker, such as a linker of any one of SEQ ID NO: 1163-SEQ ID NO: 1168, as shown above in TABLE 10 or other stable linkers. A tag useful for labeling or purification, such as FLAG, is optionally added to the fusion. Said tag can be linked with a linker that is enzymatically cleaved after purification, such as “Xa.” A FLAG-Xa linker (DYKDDDDKIEGR) is shown in SEQ ID NO: 1162.

[0427] The peptide can be a peptide of SEQ ID NO: 1, SEQ ID NO: 2, SEQ ID NO: 568, or SEQ ID NO: 569, or any peptide that is 80%, 85%, 90%, 95%, 96%, 97%, 98%, 99% or more identical to any of the foregoing.

[0428] The peptide-protein fusion is expressed recombinantly in cells or in a cell-free system using standard molecular biology techniques, such as those described in M.R. Green, Joseph Sambrook. Molecular Cloning. 2012 Cold Spring Harbor Press. For instance, DNA is synthesized that encodes for the designed polypeptide, as well as a leader peptide and other elements necessary for expression. The construct is inserted into an expression vector, which is recombined in a virus used to transfect cells, such as CHO mammalian cells or SF9 insect cells. The protein is expressed and purified. Alternatively, the 4-1BB ligand is chemically conjugated to the tumor homing and/or cell penetrating peptide, using bioconjugate chemistries described in Bioconjugate Techniques by Hermanson.

### Example 20

Treatment of a Central Nervous System (CNS) Tumor with a Peptide-RIG-I Ligand Conjugate

[0429] This example describes treatment of a CNS tumor, including brain tumors, with any peptide of the present disclosure (e.g., any one of SEQ ID NO: 1-SEQ ID NO: 1134, SEQ ID NO: 1243-SEQ ID NO: 1262, or SEQ ID NO: 1263-SEQ ID NO: 1316) conjugated to an I/O disclosed herein. The I/O is a RIG-I ligand. The peptide is recombinantly expressed or chemically synthesized and is conjugated to the RIG-I ligand as described in Example 12, Example 13, EXAMPLE 15, Example 16, or Example 17. The peptide-RIG-I ligand conjugate is administered to a subject. The subject is a human or an animal and has a CNS tumor. Administration is intravenous, subcutaneous, intranasal, oral, intraperitoneal, intramuscular, intradermal, or by intratumoral injection. Upon administration, the peptide-RIG-I ligand conjugate is targeted to cancerous tissues and cells thereof. The conjugate is internalized by cancer cells and results in immunogenic cell death, followed by an immune response that reduces or eradicates the cancer, as described in Example 38 and exhibits in vivo responses, as described in Example 45.

### Example 21

Treatment of a Central Nervous System (CNS) Tumor with a Peptide-STING Ligand Conjugate

[0430] This example describes treatment of CNS tumors, including brain tumors, with any peptide of the present disclosure (e.g., any one of SEQ ID NO: 1-SEQ ID NO: 1134, SEQ ID NO: 1243-SEQ ID NO: 1262, or SEQ ID NO: 1263-SEQ ID NO: 1316) conjugated to an I/O disclosed herein. The I/O is a STING ligand. The peptide is recombinantly expressed or chemically synthesized and is conjugated to the STING ligand as described in Example 12, Example 13, Example 15, Example 16, or Example 17. The peptide-STING ligand conjugate is administered to a subject. The subject is a human or an animal and has a CNS tumor. Administration is intravenous, subcutaneous, intranasal, oral, intraperitoneal, intramuscular, intradermal, or by intratumoral injection. Upon administration, the peptide-STING ligand conjugate is targeted to cancerous tissues and cells thereof. The conjugate is internalized by cancer cells and results in immunogenic cell death, followed by an immune response that reduces or eradicates the cancer, as described in Example 38 and exhibits in vivo responses, as described in Example 45.

### Example 22

Treatment of Breast Cancer with a Peptide-RIG-I Ligand Conjugate

[0431] This example describes treatment of breast cancer with any peptide of the present disclosure (e.g., any one of SEQ ID NO: 1-SEQ ID NO: 1134, SEQ ID NO: 1243-SEQ ID NO: 1262, or SEQ ID NO: 1263-SEQ ID NO: 1316) conjugated to an I/O disclosed herein. The I/O is a RIG-I ligand. The peptide is recombinantly expressed or chemically synthesized and is conjugated to the RIG-I ligand as described in Example 12, Example 13, Example 15, Example 16, or Example 17. The peptide-RIG-I ligand conjugate is administered to a subject. The subject is a human or an animal and has breast cancer. Administration is intravenous, subcutaneous, intranasal, oral, intraperitoneal, intramuscular, intradermal, or by intratumoral injection. Upon administration, the peptide-RIG-I ligand conjugate is targeted to cancerous tissues and cells thereof. The conjugate is internalized by cancer cells and results in immunogenic cell death, followed by an immune response that reduces or eradicates the cancer, as described in Example 38 and exhibits in vivo responses, as described in Example 45.

### Example 23

Treatment of Breast Cancer with a Peptide-STING Ligand Conjugate

[0432] This example describes treatment of breast cancer with any peptide of the present disclosure (e.g., any one of SEQ ID NO: 1-SEQ ID NO: 1134, SEQ ID NO: 1243-SEQ ID NO: 1262, or SEQ ID NO: 1263-SEQ ID NO: 1316) conjugated to an I/O disclosed herein. The I/O is a STING ligand. The peptide is recombinantly expressed or chemically synthesized and is conjugated to the STING ligand as described in Example 12, Example 13, Example 15, Example 16, or Example 17. The peptide-STING ligand conjugate is administered to a subject. The subject is a human or an animal and has breast cancer. Administration is intravenous, subcutaneous, intranasal, oral, intraperitoneal, intramuscular, intradermal, or by intratumoral injection. Upon administration, the peptide-STING ligand conjugate is targeted to cancerous tissues and cells thereof. The conjugate is internalized by cancer cells and results in immunogenic cell death, followed by an immune response that reduces or eradicates the cancer, as described in Example 38 and exhibits in vivo responses, as described in Example 45.

### Example 24

Treatment of Sarcoma with a Peptide-RIG-I Ligand Conjugate

[0433] This example describes treatment of sarcoma with any peptide of the present disclosure (e.g., any one of SEQ ID NO: 1-SEQ ID NO: 1134, SEQ ID NO: 1243-SEQ ID NO: 1262, or SEQ ID NO: 1263-SEQ ID NO: 1316) conjugated to an I/O disclosed herein. The I/O is a RIG-I ligand. The peptide is recombinantly expressed or chemically synthesized and is conjugated to the RIG-I ligand as described in Example 12, Example 13, Example 15, Example 16, or Example 17. The peptide-RIG-I ligand conjugate is administered to a subject. The subject is a human or an animal and has sarcoma. Administration is intravenous, subcutaneous, intranasal, oral, intraperitoneal, intramuscular, intradermal, or by intratumoral injection. Upon administration, the peptide-RIG-I ligand conjugate is targeted to cancerous tissues and cells thereof. The conjugate is internalized by cancer cells and results in immunogenic cell death, followed by an immune response that reduces or eradicates the cancer, as described in Example 38 and exhibits in vivo responses, as described in Example 45.

### Example 25

Treatment of Sarcoma with a Peptide-STING Ligand Conjugate

[0434] This example describes treatment of sarcoma with any peptide of the present disclosure (e.g., any one of SEQ ID NO: 1-SEQ ID NO: 1134, SEQ ID NO: 1243-SEQ ID NO: 1262, or SEQ ID NO: 1263-SEQ ID NO: 1316) conjugated to an I/O disclosed herein. The I/O is a STING ligand. The peptide is recombinantly expressed or chemically synthesized and is conjugated to the STING ligand as described in Example 12, Example 13, Example 15, Example 16, or Example 17. The peptide-STING ligand conjugate is administered to a subject. The subject is a human or an animal and has sarcoma. Administration is intravenous, subcutaneous, intranasal, oral, intraperitoneal, intramuscular, intradermal, or by intratumoral injection. Upon administration, the peptide-STING ligand conjugate is targeted to cancerous tissues and cells thereof. The conjugate is internalized by cancer cells and results in immunogenic cell death, followed by an immune response that reduces or eradicates the cancer, as described in Example 38 and exhibits in vivo responses, as described in Example 45.

### Example 26

Treatment of Melanoma with a Peptide-RIG-I Ligand Conjugate

[0435] This example describes treatment of melanoma with any peptide of the present disclosure (e.g., any one of SEQ ID NO: 1-SEQ ID NO: 1134, SEQ ID NO: 1243-SEQ ID NO: 1262, or SEQ ID NO: 1263-SEQ ID NO: 1316) conjugated to an I/O disclosed herein. The I/O is a RIG-I ligand. The peptide is recombinantly expressed or chemically synthesized and is conjugated to the RIG-I ligand as described in Example 12, Example 13, Example 15, Example 16, or Example 17. The peptide-RIG-I ligand conjugate is administered to a subject. The subject is a human or an animal and has melanoma. Administration is intravenous, subcutaneous, intranasal, oral, intraperitoneal, intramuscular, intradermal, or by intratumoral injection. Upon administration, the peptide-RIG-I ligand conjugate is targeted to cancerous tissues and cells thereof. The conjugate is internalized by cancer cells and results in immunogenic cell death, followed by an immune response that reduces or eradicates the cancer, as described in Example 38 and exhibits in vivo responses, as described in Example 45.

### Example 27

Treatment of Melanoma with a Peptide-STING Ligand Conjugate

[0436] This example describes treatment of melanoma with any peptide of the present disclosure (e.g., any one of SEQ ID NO: 1-SEQ ID NO: 1134, SEQ ID NO: 1243-SEQ ID NO: 1262, or SEQ ID NO: 1263-SEQ ID NO: 1316) conjugated to an I/O disclosed herein. The I/O is a STING ligand. The peptide is recombinantly expressed or chemically synthesized and is conjugated to the STING ligand as described in Example 12, Example 13, Example 15, Example 16, or Example 17. The peptide-STING ligand conjugate is administered to a subject. The subject is a human or an animal and has melanoma. Administration is intravenous, subcutaneous, intranasal, oral, intraperitoneal, intramuscular, intradermal, or by intratumoral injection. Upon administration, the peptide-STING ligand conjugate is targeted to cancerous tissues and cells thereof. The conjugate is internalized by cancer cells and results in immunogenic cell death, followed by an immune response that reduces or eradicates the cancer, as described in Example 38 and exhibits in vivo responses, as described in Example 45.

### Example 28

Treatment of a CNS Tumor with a Peptide-IL-15 Agent Complex

[0437] This example describes treatment of a CNS tumor, including any cancer of the CNS and/or brain, with any peptide of the present disclosure (e.g., any one of SEQ ID NO: 1-SEQ ID NO: 1134, SEQ ID NO: 1243-SEQ ID NO: 1262, or SEQ ID NO: 1263-SEQ ID NO: 1316) expressed as a fusion with an I/O disclosed herein. The I/O is any IL-15 agent disclosed herein. The peptide is recombinantly expressed as a complex with IL-15 as described in Example 18. The peptide-IL-15 agent complex is administered to a subject. The subject is a human or an animal and has a brain tumor, including any cancer of the CNS and/or brain. Administration is intravenous, subcutaneous, intranasal, oral, intraperitoneal, intramuscular, intradermal, or by intratumoral injection. Upon administration, the peptide-IL-15 agent complex is concentrated in the tumor microenvironment. Optionally, the IL-15 agent is cleaved from the peptide in the tumor microenvironment or in the tumor cells. Optionally, the IL-15 agent is processed and displayed on the surface of the tumor cells. The IL-15 agent acts on cells of the immune system to initiate, prolong, and/or enhance an immune response that reduces or eradicates the cancer, as described in Example 38 and exhibits in vivo responses, as described in Example 45.

[0438] Other peptide-I/O complexes can similarly be used to treat CNS tumors, such as peptide-IL-15 agent complexes containing an IL-15 agent such as L₀-X-L₁-Y-L₂, wherein L₁ can be SEQ ID NO: 1169 or SEQ ID NO: 1163, X can be SEQ ID NO: 1176 or SEQ ID NO: 1179, and Y can be SEQ ID NO: 1177, SEQ ID NO: 1178, in any combination. In addition, peptide-IL-15 agent complexes can comprise any of the complexes of TABLE 4.

### Example 29

Treatment of a CNS Tumor with a Peptide-4-1BB Ligand Fusion

[0439] This example describes treatment of a brain tumor, including any cancer of the CNS and/or brain, with any peptide of the present disclosure (e.g., any one of SEQ ID NO: 1-SEQ ID NO: 1134, SEQ ID NO: 1243-SEQ ID NO: 1262, or SEQ ID NO: 1263-SEQ ID NO: 1316) expressed as a complex with an I/O disclosed herein. The I/O is a 4-1BB ligand. The peptide is recombinantly expressed as a complex with the 4-1BB ligand as described in Example 19. The peptide-4-1BB ligand complex is administered to a subject. The subject is a human or an animal and has a brain tumor, including any cancer of the CNS and/or brain. Administration is intravenous, subcutaneous, intranasal, oral, intraperitoneal, intramuscular, intradermal, or by intratumoral injection. Upon administration, the peptide-4-1BB ligand complex is concentrated in the tumor microenvironment. Optionally, the 4-1BB ligand is cleaved from the peptide in the tumor microenvironment or in the tumor cells. Optionally, the 4-1BB ligand is processed and displayed on the surface of the tumor cells. The 4-1BB ligand acts on cells of the immune system to initiate, prolong, and/or enhance an immune response that reduces or eradicates the cancer, as described in Example 38 and exhibits in vivo responses, as described in Example 45.

### Example 30

Treatment of Breast Cancer with a Peptide-IL-15 Agent Complex

[0440] This example describes treatment of breast cancer with any peptide of the present disclosure (e.g., any one of SEQ ID NO: 1-SEQ ID NO: 1134, SEQ ID NO: 1243-SEQ ID NO: 1262, or SEQ ID NO: 1263-SEQ ID NO: 1316) expressed as a fusion with an I/O disclosed herein. The I/O is any IL-15 agent disclosed herein. The peptide is recombinantly expressed as a fusion protein with an IL-15 agent as described in Example 18. The peptide-IL-15 agent complexis administered to a subject. The subject is a human or an animal and has breast cancer. Administration is intravenous, subcutaneous, intranasal, oral, intraperitoneal, intramuscular, intradermal, or by intratumoral injection. Upon administration, the peptide-IL-15 agent complex is concentrated in the tumor microenvironment. Optionally, the IL-15 agent is cleaved from the peptide in the tumor microenvironment or in the tumor cells. Optionally, the IL-15 agent is processed and displayed on the surface of the tumor cells. The IL-15 agent acts on cells of the immune system to initiate, prolong, and/or enhance an immune response that reduces or eradicates the cancer, as described in Example 38 and exhibits in vivo responses, as described in Example 45.

[0441] Other peptide-I/O complexes can similarly be used to treat breast cancer, such as peptide-IL-15 agent complexes containing an IL-15 agent such as L₀-X-L₁-Y-L₂, wherein L₁ can be SEQ ID NO: 1169 or SEQ ID NO: 1163, X can be SEQ ID NO: 1176 or SEQ ID NO: 1179, and Y can be SEQ ID NO: 1177, SEQ ID NO: 1178, in any combination. In addition, peptide-IL-15 agent complexes can comprise any of the complexes of TABLE 4.

### Example 31

Treatment of Breast Cancer with a Peptide-4-1BB Ligand Fusion

[0442] This example describes treatment of breast cancer with any peptide of the present disclosure (e.g., any one of SEQ ID NO: 1-SEQ ID NO: 1134, SEQ ID NO: 1243-SEQ ID NO: 1262, or SEQ ID NO: 1263-SEQ ID NO: 1316) expressed as a fusion with an I/O disclosed herein. The I/O is a 4-1BB ligand. The peptide is recombinantly expressed as a fusion protein with the 4-1BB ligand as described in Example 19. The peptide-4-1BB ligand fusion is administered to a subject. The subject is a human or an animal and has breast cancer. Administration is intravenous, subcutaneous, intranasal, oral, intraperitoneal, intramuscular, intradermal, or by intratumoral injection. Upon administration, the peptide-4-1BB ligand fusion is concentrated in the tumor microenvironment. Optionally, the 4-1BB ligand is cleaved from the peptide in the tumor microenvironment or in the tumor cells. Optionally, the 4-1BB ligand is processed and displayed on the surface of the tumor cells. The 4-1BB ligand acts on cells of the immune system to initiate, prolong, and/or enhance an immune response that reduces or eradicates the cancer, as described in Example 38 and exhibits in vivo responses, as described in Example 45.

### Example 32

Treatment of Sarcoma with a Peptide-IL-15 Agent Complex

[0443] This example describes treatment of sarcoma with any peptide of the present disclosure (e.g., any one of SEQ ID NO: 1-SEQ ID NO: 1134, SEQ ID NO: 1243-SEQ ID NO: 1262, or SEQ ID NO: 1263-SEQ ID NO: 1316) expressed as a fusion with an I/O disclosed herein. The I/O is any IL-15 agent disclosed herein. The peptide is recombinantly expressed as a complex with any IL-15 agent as described in Example 18. The peptide-IL-15 agent complex is administered to a subject. The subject is a human or an animal and has sarcoma. Administration is intravenous, subcutaneous, intranasal, oral, intraperitoneal, intramuscular, intradermal, or by intratumoral injection. Upon administration, the peptide-IL-15 agent complex is concentrated in the tumor microenvironment. Optionally, the IL-15 agent is cleaved from the peptide in the tumor microenvironment or in the tumor cells. Optionally, the IL-15 agent is processed and displayed on the surface of the tumor cells. The IL-15 agent acts on cells of the immune system to initiate, prolong, and/or enhance an immune response that reduces or eradicates the cancer, as described in Example 38 and exhibits in vivo responses, as described in Example 45.

[0444] Other peptide-I/O complexes can similarly be used to treat sarcoma, such as peptide-IL-15 agent complexes containing an IL-15 agent such as L₀-X-L₁-Y-L₂, wherein L₁ can be SEQ ID NO: 1169 or SEQ ID NO: 1163, X can be SEQ ID NO: 1176 or SEQ ID NO: 1179, and Y can be SEQ ID NO: 1177, SEQ ID NO: 1178, in any combination. In addition, peptide-IL-15 agent complexes can comprise any of the complexes of TABLE 4.

### Example 33

Treatment of Sarcoma with a Peptide-4-1BB Ligand Fusion

[0445] This example describes treatment of sarcoma with any peptide of the present disclosure (e.g., any one of SEQ ID NO: 1-SEQ ID NO: 1134, SEQ ID NO: 1243-SEQ ID NO: 1262, or SEQ ID NO: 1263-SEQ ID NO: 1316) expressed as a fusion with an I/O disclosed herein. The I/O is a 4-1BB ligand. The peptide is recombinantly expressed as a fusion protein with the 4-1BB ligand as described in Example 19. The peptide-4-1BB ligand fusion is administered to a subject. The subject is a human or an animal and has sarcoma. Administration is intravenous, subcutaneous, intranasal, oral, intraperitoneal, intramuscular, intradermal, or by intratumoral injection. Upon administration, the peptide-4-1BB ligand fusion is concentrated in the tumor microenvironment. Optionally, the 4-1BB ligand is cleaved from the peptide in the tumor microenvironment or in the tumor cells. Optionally, the 4-1BB ligand is processed and displayed on the surface of the tumor cells. The 4-1BB ligand acts on cells of the immune system to initiate, prolong, and/or enhance an immune response that reduces or eradicates the cancer, as described in Example 38 and exhibits in vivo responses, as described in Example 45.

### Example 34

Treatment of Melanoma with a Peptide-IL-15 Agent Complex

[0446] This example describes treatment of melanoma with any peptide of the present disclosure (e.g., any one of SEQ ID NO: 1-SEQ ID NO: 1134, SEQ ID NO: 1243-SEQ ID NO: 1262, or SEQ ID NO: 1263-SEQ ID NO: 1316) expressed as a fusion with an I/O disclosed herein. The I/O is any IL-15 agent disclosed herein. The peptide is recombinantly expressed as a complex with IL-15 as described in Example 18. The peptide-IL-15 agent complex is administered to a subject. The subject is a human or an animal and has melanoma. Administration is intravenous, subcutaneous, intranasal, oral, intraperitoneal, intramuscular, intradermal, or by intratumoral injection. Upon administration, the peptide-IL-15 agent complex is concentrated in the tumor microenvironment. Optionally, the IL-15 agent is cleaved from the peptide in the tumor microenvironment or in the tumor cells. Optionally, the IL-15 agent is processed and displayed on the surface of the tumor cells. The IL-15 agent acts on cells of the immune system to initiate, prolong, and/or enhance an immune response that reduces or eradicates the cancer, as described in Example 38 and exhibits in vivo responses, as described in Example 45.

[0447] Other peptide-I/O complexes can similarly be used to treat melanoma, such as peptide-IL-15 agent complexes containing an IL-15 agent such as L₀-X-L₁-Y-L₂, wherein L₁ can be SEQ ID NO: 1169 or SEQ ID NO: 1163, X can be SEQ ID NO: 1176 or SEQ ID NO: 1179, and Y can be SEQ ID NO: 1177, SEQ ID NO: 1178, in any combination. In addition, peptide-IL-15 agent complexes can comprise any of the complexes of TABLE 4.

### Example 35

Treatment of Melanoma with a Peptide-4-1BB Ligand Fusion

[0448] This example describes treatment of melanoma with any peptide of the present disclosure (e.g., any one of SEQ ID NO: 1-SEQ ID NO: 1134, SEQ ID NO: 1243-SEQ ID NO: 1262, or SEQ ID NO: 1263-SEQ ID NO: 1316) expressed as a fusion with an I/O disclosed herein. The I/O is a 4-1BB ligand. The peptide is recombinantly expressed as a fusion protein with the 4-1BB ligand as described in Example 19. The peptide-4-1BB ligand fusion is administered to a subject. The subject is a human or an animal and has melanoma. Administration is intravenous, subcutaneous, intranasal, oral, intraperitoneal, intramuscular, intradermal, or by intratumoral injection. Upon administration, the peptide-4-1BB ligand fusion is concentrated in the tumor microenvironment. Optionally, the 4-1BB ligand is cleaved from the peptide in the tumor microenvironment or in the tumor cells. Optionally, the 4-1BB ligand is processed and displayed on the surface of the tumor cells. The 4-1BB ligand acts on cells of the immune system to initiate, prolong, and/or enhance an immune response that reduces or eradicates the cancer, as described in Example 38 and exhibits in vivo responses, as described in Example 45.

### Example 36

### Delivery of RIG-I Ligand to the Cytoplasm of Cancer Cells by Peptide Conjugation

[0449] This example describes delivery of peptide conjugates with RIG-I ligand to the cytoplasm of cancer cells. RIG-I ligands are conjugated to any peptide of the present disclosure (e.g., SEQ ID NO: 1-SEQ ID NO: 1134, SEQ ID NO: 1243-SEQ ID NO: 1262, or SEQ ID NO: 1263-SEQ ID NO: 1316), as described in Example 12, Example 13, Example 15, Example 16, or Example 17. The peptide-RIG-I ligand conjugate is administered to a subject, such as a human or a non-human animal. The conjugate accesses the cytoplasm of cancer cells, due to the tumor homing and/or cell penetrating properties of the peptide.

[0450] Alternatively, a cancer cell line, such as any human tumor cell line (e.g., MCF-7 human breast cancer cell line, a HepG2 cell line, an Huh 7(0.5) cell line, an HT29 cell line, an HCT-15 cell line, a CaCO-2 cell line, an MDA-MB-231 cell line, an MDA-MB-453 cell line, an MDA-MB-468 cell line, a BT-549 cell line, an HCC38 cell line, a 4T1 cell line, an MDA-MB-436 cell line, an HL-60 cell line, a Capan-1 cell line, a CFPAC-1 cell line, an SK-OV3 cell line, a PC3 cell line, a Du145 cell line, a LnCap cell line, an H1299 cell line, an A549 cell line, an H358 cell line, an H460 cell line, an LK2 cell line, a DO4mel cell line, or a Ma-Mel-86c cell line) or any mouse tumor cell line (e.g., a Panc02 cell line, a PANC-1 cell line, a Mia PaCa-2 cell line, a 4T1 cell line, a CT26 cell line, an A20 cell line, an HcMel 12 cell line, a B16F10 cell line, an EG7(Ova) cell line, a C1498 cell line, an LLC cell line, a GL261-luc cell line, or an MC38 cell line) is grown in culture. Cells are exposed to the peptide-I/O complex. Upon exposure, the conjugate is internalized by the cells and the I/O is released. The target (RIG-I) is present in the cell cytoplasm and is stimulated by the I/O, resulting in release of Type I Interferon (e.g. IFNß) into the cell culture medium. The cell culture medium is collected and the amount of Type I Interferon is measured using an ELISA assay. The released amount is compared to the amount of Type I Interferon released from controls, including unstimulated cells and cells treated with free I/O. The I/O, in the absence of peptide conjugation, does not penetrate the cell membrane and is unable to stimulate the target (RIG-I) in the cytoplasm at levels as high as the peptide-I/O complex. An increase in release of Type I Interferon from cultures stimulated with conjugates, compared with controls, demonstrates delivery of the I/O to the cytoplasm by the peptide and stimulation of RIG-I by the RIG-I ligand, which is the I/O.

### Example 37

### Delivery of STING Ligand to the Cytoplasm of Cancer Cells by Peptide Conjugation

[0451] This example describes delivery of peptide conjugates with STING ligands to the cytoplasm of cancer cells. STING ligands are conjugated to any peptide of the present disclosure (e.g., SEQ ID NO: 1-SEQ ID NO: 1134, SEQ ID NO: 1243-SEQ ID NO: 1262, or SEQ ID NO: 1263-SEQ ID NO: 1316), as described in Example 12, Example 13, Example 15, Example 16, or Example 17. The peptide-STING ligand conjugate is administered to a subject, such as a human or a non-human animal. The conjugate access the cytoplasm of cancer cells, due to the tumor homing and/or cell penetrating properties of the peptide.

[0452] Alternatively, a cancer cell line, such as any human tumor cell line (e.g., MCF-7 human breast cancer cell line, a HepG2 cell line, an Huh 7(0.5) cell line, an HT29 cell line, an HCT-15 cell line, a CaCO-2 cell line, an MDA-MB-231 cell line, an MDA-MB-453 cell line, an MDA-MB-468 cell line, a BT-549 cell line, an HCC38 cell line, a 4T1 cell line, an MDA-MB-436 cell line, an HL-60 cell line, a Capan-1 cell line, a CFPAC-1 cell line, an SK-OV3 cell line, a PC3 cell line, a Du145 cell line, a LnCap cell line, an H1299 cell line, an A549 cell line, an H358 cell line, an H460 cell line, an LK2 cell line, a DO4mel cell line, or a Ma-Mel-86c cell line) or any mouse tumor cell line (e.g., a Panc02 cell line, a PANC-1 cell line, a Mia PaCa-2 cell line, a 4T1 cell line, a CT26 cell line, an A20 cell line, an HcMel 12 cell line, a B16F10 cell line, an EG7(Ova) cell line, a C1498 cell line, an LLC cell line, a GL261-luc cell line, or an MC38 cell line) is grown in culture. Cells are exposed to the peptide-I/O complex. Upon exposure, the conjugate is internalized by the cells and the I/O is released or presnt in the cytoplasm. The target (STING) is present in the cell cytoplasm and is stimulated by the I/O, resulting in release of Type I Interferon (e.g. IFNß) into the cell culture medium. The cell culture medium is collected and the amount of Type I Interferon is measured using an ELISA assay. The released amount is compared to the amount of Type I Interferon released from controls, including unstimulated cells and cells treated with free I/O. The I/O, in the absence of peptide conjugation, does not penetrate the cell membrane or release from the endosome in sufficient quantities, and is unable to stimulate the target (STING) in the cytoplasm at levels as high as the peptide-I/O complex. An increase in release of Type I Interferon from cultures stimulated with conjugates, compared with controls, demonstrates delivery of the I/O to the cytoplasm by the peptide and stimulation of STING by the STING ligand, which is the I/O.

### Example 38

### In Vitro Demonstration of Immunogenic Cell Death (ICD)

[0453] This example describes induction of immunogenic cell death (ICD) in cancer cells in vitro, following exposure of a peptide-I/O complex of the present disclosure. The peptide (e.g., any one of SEQ ID NO: 1-SEQ ID NO: 1134, SEQ ID NO: 1243-SEQ ID NO: 1262, or SEQ ID NO: 1263-SEQ ID NO: 1316) is recombinantly expressed or chemically synthesized and then conjugated to a RIG-I ligand or a STING ligand as described in Example 12, Example 13, Example 15, Example 16, or Example 17. A cancer cell line, such as MCF-7 human breast cancer cell line, is grown in culture. Cells are exposed to the peptide-I/O complex. Upon exposure, the peptide-I/O complexis internalized by the cells and the I/O is released or present in the cytoplasm. The I/O stimulates its target (RIG-I, MDA5, or STING), resulting in release of Type I Interferon as described in Example 36, as well as other cellular events resulting from ICD. These include secretion of the chemokine CXCL 10 and the cytokine IL-6, release of HMGB1 and Hsp70, upregulation of cell surface MHC Class I (MHC I) and Fas expression, and exposure of calreticulin on the cell surface. Cells in culture are exposed to the peptide-I/O complex overnight, for 24 hours, for 48 hours, or longer. Cell culture medium is harvested, and the amount of secreted CXCL10, IL-6, HMGB1, or Hsp70 is measured by ELISA. Expression of MHC I and Fas, as well as the cell surface exposure of calreticulin, is measured by flow cytometry. Induction of cell death is indicated by staining the cells with a monoclonal antibody (mAb) against Annexin V plus propidium iodide (PI) or another fluorescent DNA stain such as 4′,6-diamidino-2-phenylindole (DAPI). As cells move through apoptosis, they first express Annexin V and then become permeable to PI. Increases in one or more of these parameters, as compared with control cell cultures, indicates that an ICD pathway has been stimulated by the peptide-I/O complex.

### Example 39

[0454] In Vitro Demonstration of Dendritic Cell Activation by Cancer Cells Undergoing Immunogenic Cell Death

[0455] This example describes activation of dendritic cells (DC) following co-culture with cancer cells that are undergoing immunogenic cell death (ICD) following exposure to a any peptide-I/O complex of the disclosure, as described in Example 38. CD11c″ dendritic cells are isolated from mouse spleens and grown in culture with, for example, any human tumor cell line (e.g., MCF-7 human breast cancer cell line, a HepG2 cell line, an Huh7(0.5) cell line, an HT29 cell line, an HCT-15 cell line, a CaCO-2 cell line, an MDA-MB-231 cell line, an MDA-MB-453 cell line, an MDA-MB-468 cell line, a BT-549 cell line, an HCC38 cell line, a 4T1 cell line, an MDA-MB-436 cell line, an HL-60 cell line, a Capan-1 cell line, a CFPAC-1 cell line, an SK-OV3 cell line, a PC3 cell line, a Du145 cell line, a LnCap cell line, an H1299 cell line, an A549 cell line, an H358 cell line, an H460 cell line, an LK2 cell line, a DO4mel cell line, or a Ma-Mel-86c cell line) or any mouse tumor cell line (e.g., a Panc02 cell line, a PANC-1 cell line, a Mia PaCa-2 cell line, a 4T1 cell line, a CT26 cell line, an A20 cell line, an HcMel12 cell line, a B16F10 cell line, an EG7(Ova) cell line, a C1498 cell line, an LLC cell line, a GL261-luc cell line, or an MC38 cell line) that have been treated with a peptide-I/O complex of the present disclosure. Untreated MCF-7 cells are used as a negative control. Cells are co-cultured for up to 12 hours, overnight, for 24 hours, for 48 hours, or longer. Following co-culture, expression of cell surface markers on the DCs and cytokine production into the medium of the co-cultures are measured. Cell surface markers that are upregulated on DCs include costimulatory molecules CD80 and CD86 and the early activation marker CD69. Levels of the cytokines IL-1, IL-6, and/or CXCL10 are significantly higher in medium from co-cultures than from cultures of stimulated tumor cells alone, which indicates production predominantly from DCs.

### Example 40

### Liposomal Delivery

[0456] This example describes use of a liposome to deliver a drug or a peptide-drug conjugate of the present disclosure to cancer cells in vivo. A peptide of the present disclosure is attached to the surface of a liposomal particle or other nanoparticle as described in Example 41. A RIG-I or STING ligand of the present disclosure is encapsulated in the liposome. The liposome is delivered to a patient intravenously or by intratumoral injection. The peptide targets the liposome for internalization by tumor cells. Following internalization, the ligand is delivered to the cytoplasm of the tumor cells, where it can stimulate its target and induce immunogenic cell death (ICD).

### Example 41

### Liposome Manufacturing

[0457] This example describes liposome manufacturing. Soybean phosphatidylcholine, DC-chol, DSPE-PEG, and Maleimide-PEG2000-DSPE are dissolved in chloroform. The solvent is evaporated by rotary evaporation or blowing gas. The lipid film is redissolved in chlorform and the I/O to be delivered (e.g., a RIG-I ligand, a STING ligand, an IL-15 agent, a 4-1BB ligand, or an MDA5 ligand) is added in buffer. The mixture is vortexed and sonicated. The solution is evaporated at 37° C. to remove chloroform and leave the liposomes in an aqueous phase solution. The solution is extruded by turning through a polycarbonate filter (e.g., 400 nm, 200 nm, and then 100 nm). A peptide of this disclosure comprises a thiol group, which is introduced on the peptide by reacting an amine group with Traut's reagent. The thiolated peptide is inclubated with extruded liposomes and the thiol group of the peptide reacts with the maleimide group of a lipid, thus obtaining a liposome displaying on its surface, a peptide of this disclosure. Optionally, the agent to deliver is instead, or also, functionalized with a thiol group and incubated with the liposomes, thus obtaining a liposome that is decorated with the agent on its surface. After incubation overnight at room temperature, liposomes are purified by chromatography.

### Example 42

### In Vitro Bioactivity of Peptide-IL-15 Agent Complexes or Peptide-IL-15 Hyperagonist Complexes

[0458] This example describes the in vitro bioactivity of any IL-15 agent or, specifically, an IL-15 hyperagonists (I/Os) expressed as complexes with any peptide of this disclosure (e.g., any one of SEQ ID NO: 1-SEQ ID NO: 1134, SEQ ID NO: 1243-SEQ ID NO: 1262, or SEQ ID NO: 1263-SEQ ID NO: 1316). A peptide of the present disclosure is recombinantly expressed as a complex with an IL-15 agent or an IL-15 hyperagonist (e.g., any one of SEQ ID NO: 1135-SEQ ID NO: 1138) as described in Example 18. Human peripheral blood mononuclear cells (PBMC) are isolated from healthy adult donors and prepared by density gradient centrifugation. Cells are cultured in medium with no added cytokine (negative control), with recombinant human IL-15 (positive control), or with an equimolar quantity of the peptide-I/O complex described herein. After culture for up to 7 days, cells are stained with antibodies to cell surface proteins specific to the various cell lineages and quantitated using flow cytometry. Expansion of CD56+ T cell and NK cell populations relative to negative control cultures indicates that IL-15 activity is present.

[0459] The cytotoxicity of T cells is also increased by the IL-15 agent or the IL-15 hyperagonist. To measure this activity, CD3+ T cells are isolated from PBMCs using antibody-coated magnetic beads and isolated cells are cultured in medium with no added cytokine (negative control), with recombinant human IL-15 (positive control), or with an equimolar quantity of the peptide-I/O fusion described herein. After culture for up to 7 days, cells are used as effectors in a cytotoxicity assay against a target cell line such as K562 (human leukemia cell line). Target cell killing is measured, for example, by a 51Cr release assay. An increase in cytotoxic effector function indicates that IL-15 activity is present.

[0460] IL-15 activity is quantified in vitro by its ability to stimulate proliferation of factor dependent cell lines, including CTLL, 32D, and TF1. Proliferation of activated human peripheral blood T cells can also be used to measure IL-15 activity. For example, different IL-15 fusions are added, at various concentrations, to cultures of factor dependent cell lines or T cells. After several days of culture (1-4 days), the number of cells in each culture can be measured by any one of a number of quantitative methods to detect live cells. The concentration of the cytokine fusion that gives 50% of maximal proliferation is used as a measure of the potency.

[0461] Other peptide-I/O complexes can similarly exhibit that IL-15 activity, such as peptide-I/O complexes, which are fusions of IL-15 with IL-15Rα sushi+ and any peptide of the present disclosure (e.g., any one of SEQ ID NO: 1-SEQ ID NO: 1134, SEQ ID NO: 1243-SEQ ID NO: 1262, or SEQ ID NO: 1263-SEQ ID NO: 1316), and peptide-IL-15 agent complexes containing an IL-15 agent such as L₀-X-L₁-Y-L₂, wherein L₁ can be SEQ ID NO: 1169 or SEQ ID NO: 1163, X can be SEQ ID NO: 1176 or SEQ ID NO: 1179, and Y can be SEQ ID NO: 1177, SEQ ID NO: 1178, in any combination. In addition, peptide-IL-15 agent complexes can comprise any of the complexes of TABLE 4.

### Example 43

Fusions of IL-15 with IL-15Rα sushi+ and Peptides

[0462] This example describes peptide-I/O complexes, which are fusions of IL-15 with IL-15Rα sushi+ and any peptide of the present disclosure (e.g., any one of SEQ ID NO: 1-SEQ ID NO: 1134, SEQ ID NO: 1243-SEQ ID NO: 1262, or SEQ ID NO: 1263-SEQ ID NO: 1316) for the purpose of delivering a hyper potent IL-15 agent to tumors. The fusions are comprised of IL-15 and portions of IL-15Rα, which are further linked to a peptide of the present disclosure via linkers, including a linker that is, optionally, cleavable between the IL-15-IL 15Rα hyperagonist fusion and the peptide of the present disclosure for intracellular release of the IL-15 hyperagonist fusion allowing for recycling back to the cell surface or secretion. FIG. 3A shows an illustration of an IL-15 hyperagonist fusion with a peptide of this disclosure SEQ ID NO: 568 (adapted from Mortier et al. (J Biol Chem. 2006 Jan. 20;281(3): 1612-9)), which is used as an example and can be substituted with any peptide of the present disclosure.

[0463] FIG. 3A illustrates the sequence of IL-15Rα using the sushi+portion, a linker, IL-15, and SEQ ID NO: 568 (referred to as an “RLIX” from the N to C-terminus direction). The sequence of said fusion is set forth in SEQ ID NO: 1173 (MAPRRARGCRTLGLPALLLLLLLRPPATRGDYKDDDDKIEGRITCPPPMSVEHADIWVKSY SLYSRERYICNSGFKRKAGTSSLTECVLNKATNVAHWTTPSLKCIRDPAL VHQRPAPPGGSG GGGSGGGSGGGGSLQNWVNVISDLKKIEDLIQSMHIDATLYTESDVHPSCKVTAMKCFLLE LQVISLESGDASIHDTVENLIILANNSLSSNGNVTESGCKECEELEEKNIKEFLQSFVHIVQMF INTSXXXXXX XXXXXXXXXXXXXX XXXXXXXXXXXXXXMC MPCFTTDHQMARKCDDCCGGKGRGKCYGPQCLCR also shown in FIG. 3B). The Xs in SEQ ID NO: 1173 is replaced by a linker. The linker can be cleavable (e.g., any one of SEQ ID NO: 1139-SEQ ID NO: 1161, SEQ ID NO: 1360-SEQ ID NO: 1363 and SEQ ID NO: 1365) or can be stable (e.g., any one of SEQ ID NO: 1163-SEQ ID NO: 1172). The Sp leader (MAPRRARGCR TLGLPALLLL LLLRPPATRG) (SEQ ID NO: 1232) and FLAG-Xa tag are both optional, as directions for secretion and a tag for labeling, which can be replaced with other leaders or tags or omitted. FIG. 4A shows an illustration of IL-15, a linker, IL-15Rα sushi+, and a peptide of SEQ ID NO: 568 (referred to as an “ILRX”), and whose sequence is set forth in SEQ ID NO: 1174 (MAPRRARGCRTLGLPALLLLLLLRPPATRGDYKDDDDKIEGRNWVNVISDLKKIEDLIQSM HIDATLYTESDVHPSCKVTAMKCFLLELQVISLESGDASIHDTVENLIILANNSLSSNGNVTE SGCKECEELEEKNIKEFLQSFVHIVQMFINTSSGGGSGGGGSGGGGSGGGGSGGGSLQITCP PPMSVEHADIWVKSYSLYSRERYICNSGFKRKAGTSSLTECVLNKATNVAHWTTPSLKCIR DPAL VHQRPAPPXXXXXXXXXXXXXXXXXXXXXXXXXXXXXXXXXXXXXXXXXXXXX XXXXXMCMPCFTTDHQMARKCDDCCGGKGRGKCYGPQCLCR; also shown in FIG. 4B). The Sp leader (SEQ ID NO: 1232) and Flag-Xa tag are both optional, as directions for secretion and a tag for labeling, which can be replaced with other leaders or tags or omitted. The full sequence includes the mature secreted protein and the IL-15Rα sushi+sequence (comprising the sushi domain encoded by Exon 2 plus the N terminal 13 amino acids encoded by Exon 3). For example, the IL-15 agent can be L₀-X-L₁-Y-L₂, wherein one of X or Y can be any one SEQ ID NO: 1177 or SEQ ID NO: 1178 and one of X or Y can be SEQ ID NO: 1176. Furthermore, L₀, L₁ and L₂ can be any one of SEQ ID NO: 1163-SEQ ID NO: 1172 or can be Xn, where each X is independently any amino acid and n=1-50 or can be absent. As another example, the IL-15 agent can be L₀-X-L₁-Y-L₂. wherein L₁ can be SEQ ID NO: 1169 or SEQ ID NO: 1163, X can be SEQ ID NO: 1176 or SEQ ID NO: 1179, and Y can be SEQ ID NO: 1177, SEQ ID NO: 1178, in any combination. In addition, peptide-IL-15 agent complexes can comprise any of the complexes of TABLE 4.

[0464] SEQ ID NO: 1162, encoding for the FLAG epitope and Factor Xa binding site (FLAG-Xa) is optionally added between the signal peptide (which directs its post-translational secretion) and the coding sequences. A signal peptide is a native sequence associated with a subunit, or an artificial one. A linker peptide, such as the 19aa peptide NH2-GGSGGGGSGGGSGGGGSLQ-COOH (SEQ ID NO: 1163) (Bouchard et al. J Mol Biol. 2008 Sep. 26;382(1): 1-12), or the 20aa peptide NH2-SGGSGGGGSGGGSGGGGSLQ-NH2 (SEQ ID NO: 1169) (Mortier et al. J Biol Chem. 2006 January 20;281(3): 1612-9) is inserted in an RLIX between the C-terminus of IL-15Rα-sushi+ and the N-terminus of IL-15. The 26aa linker peptide: NH2-SGGGSGGGGSGGGGSGGGGSGGGSLQ-COOH (SEQ ID NO: 1165) (Mortier 2006) is inserted in ILRX between the N-terminus of IL-15Rα-sushi+ and the C-terminus of IL-15. The cleavable linker (NH2-cleavable linker) is inserted between the C terminus of IL-15 (RLIX), or 15Rα-sushi+(ILRX), and the N-terminus of chlorotoxin. The NH2-cleavable linker can be any cleavable linker, such as any one of SEQ ID NO: 1139-SEQ ID NO: 1161, SEQ ID NO: 1360-SEQ ID NO: 1363 and SEQ ID NO: 1365.

[0465] In addition to the IL-15 sequence described above, one or more of the following IL-15 mutants can be substituted: L₄₅D (Bernard et al. J Biol Chem. 2004 Jun. 4;279(23): 24313-22), L₄₅E (Bernard et al. J Biol Chem. 2004 Jun. 4;279(23):24313-22), Q48K (Bernard et al. J Biol Chem. 2004 Jun. 4;279(23):243 13-22), V49D (Bernard et al. J Biol Chem. 2004 Jun. 4;279(23):243 13-22), S51D (Bernard et al. J Biol Chem. 2004 Jun. 4;279(23):24313-22), L₅₂D (Bernard et al. J Biol Chem. 2004 Jun. 4;279(23):24313-22), N72D (Zhu 2009 and U.S. Pat. No. 816,3879), N72E (Zhu 2009), N72A (Zhu 2009), N72S (Zhu 2009), N72Y (Zhu 2009), N72R (U.S. Pat. No. 816,3879), or D61A (U.S. Pat. No. 816,3879) where the first letter denotes the amino acid that is mutated as the position in the IL15 sequence denoted by the number and the second letter denotes the new amino acid that is substituted. For example, L₄₅D means the L at position 45 in IL 15 is mutated to D. The endogenous 30aa IL-15Rα signal peptide can be substituted with any of the signal peptides that are used in the art for efficient CHO secretion.

[0466] Peptides disclosed herein were conjugated (e.g., recombinantly fused) to various IL-15 agents to obtain peptide-IL-15 agent complexes. Peptides of the present disclosure were fused via a linker to the full length, mature human IL-15 (SEQ ID NO: 1177) and residues 1-77 of the IL-15Rα sushi domain of the human IL-15 receptor (SEQ ID NO: 1176). Peptide-IL-15 agent complexes included rigid and flexible linkers (Chen 2013) and comprised peptides of SEQ ID NO: 568 and SEQ ID NO: 569, or any peptide that is 80%, 85%, 90%, 95%, 96%, 97%, 98%, 99% or more identical to any of the foregoing. Some peptide-IL-15 agent complexes also included a designed enzymatic cleavage site, such as a cathepsins cleavable Val-Ala site (SEQ ID NO: 1139) (Kramer 2017, Jain 2015) or an MMP cleavable PLGLAG sequence (SEQ ID NO: 1499) (Aguilera 2009). A 10x His tag (SEQ ID NO: 1498) or a FLAG tag was added, usually to the end of the peptide-I/O complex not bearing the peptide, to facilitate purification and labeling. Sequences of peptide-IL-15 agent complexes are shown in TABLE 4. The genes for peptide-I/O complexes having sequences of SEQ ID NO: 1317-SEQ ID NO: 1329 were synthesized.

[0467] Molecular biology was performed. Gene sequences were generated using the following design: HindIII-Kozak-igkappa-10xHis (SEQ ID NO: 1498)-GOI-**-EcoRI, where the IgK leader was METDTLLLWVLLLWVPGST (SEQ ID NO: 1500) and GOI means gene of interest. The gene was synthesized and directly subcloned into expression vector pcDNA3.4 and the sequence of the coding region was verified. 5 ug of purified plasmid DNA containing the synthesized gene of interest was cloned into the mammalian expression vector was supplied. The genes were successfully synthesized and plasmids were generated.

[0468] Expression and RLI purification. Peptide-I/O complexes of SEQ ID NO: 1317-SEQ ID NO: 1321 were expressed at 100 mL scale in Expi293 (HEK293) cell culture at 37° C. with 8% CO2 and a rotational speed of 125 RPM. Conditioned supernatant was harvested as soon as viability dropped below 80%(6 days post-transfection) and isolated by centrifugation. The resulting conditioned media was frozen on dry ice.

[0469] An RLI (containing an IL-15 agent such as L₀-X-L₁-Y-L₂, wherein L₁ can be SEQ ID NO: 1169 or SEQ ID NO: 1163, X can be SEQ ID NO: 1176 or SEQ ID NO: 1179, and Y can be SEQ ID NO: 1177, SEQ ID NO: 1178, in any combination as a His-tagged RLI protein (SEQ ID NO: 1342) was similarly expressed at 300 mL scale at a rotational speed of 85 RPM and purified using a HisTrap IMAC column. Elution was performed using a linear gradient from 20-500 mM imidazole in PBS, 500 mM NaCl. Fractions D13-H13 were pooled, followed by 16 h dialysis against PBS. 63 mg of product at 0.67 mg/mL (based on A280 and E1% of 9.3) was frozen as 47×2.0 mL aliquots and shipped. Analysis included reducing SDS-PAGE with Coomassie staining and a reducing Western blot using an anti-His antibody, with 12 uL loaded per lane.

[0470] Purification of SEQ ID NO: 1317-SEQ ID NO: 1321. A small-scale purification of SEQ ID NO: 1317-SEQ ID NO: 1321 was performed using HisPur NI-NTA nickel columns. For each peptide-IL-15 agent complex, 2 mL of conditioned supernatant was mixed with 2 mL of equilibration buffer (20 mM sodium phosphate, 300 mM sodium chloride (PBS) with 10 mM imidazole; pH 7.4) The columns were equilibrated with 2 mL equilibration buffer prior to initial loading and 4 mL of 1:1 diluted sample was loaded onto the column and allowed to flow through. The flow-through (FT) fraction was collected and stored at 4° C. Following loading the column was washed 3 times with 2 mL each of wash buffer (PBS with 25 mM imidazole; pH 7.4) and each fraction (W1-3) was collected separately (3×2 mL) and stored at 4° C. The peptide-IL-15 agent complexes were eluted by adding 1 mL of elution buffer (PBS with 250 mM imidazole) and repeating two more times, collecting a total of 3 mL (3×1 mL). Eluted fractions (E1-3) were stored at 4° C. All fractions (Sup, FT, W1-3, and E1-3) were analyzed by reducing SDS-PAGE (20 uL load per lane) and stained with Coomassie Blue (Simply Blue Coomassie Stain).

[0471] Eluted fractions containing the fusion proteins were pooled (2 mL total) and buffer exchanged with PBS using Zeba spin desalting columns (5 mL bed volume). Columns were prepared by placing columns in a 15 ml conical collection tube and centrifuged at 1000×g for 2 minutes to remove storage buffer. PBS (2.5 mL) was added to the column and centrifuged 1000×g for 2 minutes and repeated three additional times discarding buffer from the collection tube each time. The column was placed in a new collection tube and 2 mL of sample was applied to the center of the resin bed. The column was centrifuged at 1000×g for 2 minutes to collect the sample. All samples were analyzed by reducing SDS-PAGE and stained with Coomassie Blue and quantitated based on A280 and E1% (range between 8.2-8.6). Samples were aliquoted (500 uL each) into Eppendorf tubes and stored at−20° C.

[0472] A large-scale purification (10x) was performed on each peptide-IL-15 agent complex of SEQ ID NO: 1317 and SEQ ID NO: 1321 by mixing 20 mL of each supernatant with 20 mL of equilibration buffer. The 1:1 diluted sample (40 mL) was loaded onto the nickel column and washed and eluted using the same conditions described above for the small-scale purification but adding additional washing (5×2 mL) and elution (5×1 mL) steps. All fractions were analyzed by reducing SDS-PAGE and stained with Coomassie Blue. Following buffer exchange in PBS of pooled eluted fractions the final samples were compared by both reducing and non-reducing SDS-PAGE.

[0473] Expression of exemplary RLI protein (e.g., containing an IL-15 agent such as L₀-X-L₁-Y-L₂, wherein L₁ can be SEQ ID NO: 1169 or SEQ ID NO: 1163, X can be SEQ ID NO: 1176 or SEQ ID NO: 1179, and Y can be SEQ ID NO: 1177, SEQ ID NO: 1178, in any combination as a His-tagged RLI protein (SEQ ID NO: 1342) purification. The 300 mL SEQ ID NO: 1342 expression and purification yielded 63 mg of product at 0.67 mg/mL (28 uM), or 0.2 mg per mL of cell culture. FIG. 45 illustrates coomassie-stained SDS-PAGE and anti-His Western analysis of an RLI protein (such as containing SEQ ID NO: 1169, SEQ ID NO: 1176, and SEQ ID NO: 1177) as a His-tagged RLI protein (SEQ ID NO: 1342) and shows strong signal of two bands, around 25-26 and 30-34 kDa The two bands may represent different glycosylation patterns, as was seen in Kermer et al. (Mol Cancer Ther. 2012 June; 11(6): 1279-1288).

[0474] FIG. 46 illustrates the chromatogram and SDS-PAGE analysis of IMAC purification of RLI protein (comprising SEQ ID NO: 1169, SEQ ID No 1176, and SEQ ID No 1177) as a His-tagged RLI protein (SEQ ID NO: 1342). Fractions D13-H13 were pooled and dialyzed to yield the final material. FIG. 47 illustrates coomassie-stained SDS-PAGE and anti-His Western analysis of the conditioned media from expression of SEQ ID NO: 1317-SEQ ID NO: 1321. SEQ ID NO: 1317, SEQ ID NO: 1319, and SEQ ID NO: 1321 exhibited a strong band around 38-42 kDa by both analyses. The width and fuzziness of the band could indicate multiple overlapping glycosylation patterns. At the N-terminus, SEQ ID NO: 1317, SEQ ID NO: 1319, and SEQ ID NO: 1321 all have a His tag followed by the IL-15Rα protein. SEQ ID NO: 1318 had a much fainter band near the target size by Coomassie stain but no signal evident in this Western analysis. SEQ ID NO: 1318 also had an N-terminal His tag, but the His tag is adjacent to IL-15. It is possible this conformation makes the His tag less available to the anti-His antibody for Western visualization. SEQ ID NO: 1320 exhibited little if any staining visible at the target size by Coomassie, though it did exhibit signal (2 bands around 34 and 39 kDa, which may also represent different glycosylation patterns) by Western analysis. SEQ ID NO: 1320 comprises at its N-terminus, a peptide of SEQ ID NO: 568, and has the His tag at its C-terminus. Higher expression yields seem to be obtained with an 15Rα-sushi+at the N-terminus than with the IL-15 or SEQ ID NO: 568 at the N-terminus.

[0475] Purification of SEQ ID NO: 1317 and SE ID NO: 1321. FIG. 48 illustrates Coomassie-stained SDS-PAGE of fractions obtained from the small-scale purification of peptide-IL-15 agent complexes of SEQ ID NO: 1317 and SEQ ID NO: 1321. FIG. 49 illustrates Coomassie-stained SDS-PAGE of purified fractions E2-E3 for each peptide-IL-15 agent complex after pooling and buffer exchange in PBS. Both SEQ ID NO: 1317 and SEQ ID NO: 1321 bound and eluted from the nickel column as predicted and the purified forms of each fusion revealed a band at approximately 38 kD by SDS-PAGE, which was found to be consistent with the Western Blot data describe above.

[0476] Purification of SEQ ID NO: 1318. FIG. 50 illustrates Coomassie-stained SDS-PAGE of fractions obtained from the small-scale purification of SEQ ID NO: 1318. FIG. 51 illustrates Coomassie-stained SDS-PAGE of purified fractions E2-E3 after pooling and buffer exchange in PBS. Similar to SEQ ID NO: 1317 and SEQ ID NO: 1321, SEQ ID NO: 1318 bound and eluted from the nickel column and the purified form showed a band at approximately 38 kD by SDS-PAGE. This result was surprising since there was no significant band present when analyzed by Western Blot using anti-His antibody as described above, yet the His-Tag sequence was accessible to the nickel-charged chelate immobilized on the nickel column.

[0477] Purification of SEQ ID NO: 1319 and SEQ ID NO: 1320. FIG. 52 illustrates Coomassie-stained SDS-PAGE of fractions obtained from the small-scale purification of SEQ ID NO: 1319 and SEQ ID NO: 1320. Similar to SEQ ID NO: 1317, SEQ ID NO: 1318, and SEQ ID NO: 1321. SEQ ID NO: 1319 bound and eluted from the nickel column and the purified form showed a band at approximately 38 kD by SDS-PAGE; however, very little staining appeared by Coomassie-stained SDS-PAGE for SEQ ID NO: 1320. This is consistent with both the very faint bands in the same area for the starting material as well as the faint staining seen in the Western Blot analysis.

[0478] A summary of the purification of SEQ ID NO: 1317-SEQ ID NO: 1321 is shown in TABLE 11. Overall, the purification of each His-Tagged peptide-IL-15 agent complex was successful with prominent bands seen by Coomassie-stained SDS-PAGE for the high expressers and a final yield from 1 mL of starting material within a range of 80-130 ug.

TABLE 11
Summary of Small-Scale Purification of
SEQ ID NO: 1317-SEQ ID NO: 1321

| SEQ ID NO | Conc mg/mL | Yield from 1 mL supernatant (ug) |
|---|---|---|
| SEQ ID NO: 1319 | 0.13 | 130 |
| SEQ ID NO: 1320 | 0.10 | 100 |
| SEQ ID NO: 1317 | 0.09 | 90 |
| SEQ ID NO: 1318 | 0.13 | 130 |
| SEQ ID NO: 1321 | 0.08 | 80 |

[0479] Large-scale purification of SEQ ID NO: 1317 and SEQ ID NO: 1321 using 20 mL of starting material (10x) was performed on the same size columns (1 mL) used for the small-scale purification. FIG. 53 illustrates Coomassie-stained SDS-PAGE of fractions obtained from the large-scale purification of SEQ ID NO: 1317 and SEQ ID NO: 1321. For both peptide-IL-15 agent complexes, high concentrations of purified protein eluted in fractions E2-E4. The lack of any prominent bands seen at 38 kD in the flow-through (FT) fraction of each purification run indicated the column was not overloaded and has a high binding capacity for these proteins. FIG. 54 illustrates Coomassie-stained SDS-PAGE of fractions E2-E4, which were pooled, buffer exchanged in PBS, and further analyzed under reducing and non-reducing conditions. A single prominent band at ˜38 kD seen under non-reducing conditions suggests the proteins are homogenous with no scrambling of disulfide linkages that may produce intermolecular disulfides resulting in disulfide-linked aggregates.

[0480] Other RLI can be similarly purified, such as peptide-IL-15 agent complexes containing an IL-15 agent such as L₀-X-L₁-Y-L₂, wherein L₁ can be SEQ ID NO: 1169 or SEQ ID NO: 1163, X can be SEQ ID NO: 1176 or SEQ ID NO: 1179, and Y can be SEQ ID NO: 1177, SEQ ID NO: 1178, in any combination. In addition, peptide-IL-15 agent complexes can comprise any of the complexes of TABLE 4.

### Example 44

### Screening of Peptide-Immuno-oncology Agent (I/Os) Complexes

[0481] This example describes screening of I/Os to be administered as a complex with a peptide of the present disclosure for cancer therapy. A peptide of the present disclosure, such as any peptide of SEQ ID NO: 1-SEQ ID NO: 1134, SEQ ID NO: 1243-SEQ ID NO: 1262, or SEQ ID NO: 1263-SEQ ID NO: 1316, is recombinantly expressed or chemically synthesized and complexed with an I/O. The I/O is an IL-15 agent, a 4-1BB ligand, a RIG-I ligand, an MDA5 ligand, or a STING ligand or any one of the exemplary I/Os of the present application, such as cytokines, including, but not limited to, interferons, interleukin (IL)-2, IL-15, IL-21, IL-12, IL-23, IL-27, IL-1, IL-18, IL-33; checkpoint inhibitors including, but not limited to, inhibitors of CTLA-4, PD-1, TIM-3, LAG-3, VISTA, B7-H3, B7-H4, B7S1, galectin 9, CD244, BTLA, CD160, CIS, LIGHT, TIGIT; ligands of pattern recognition receptors (PRRs) including, but not limited to TLR, NLR, ALR, CLR, RLR, RIG-I, and STING; molecules that inhibit the macrophage checkpoint CD47, including, but not limited to, SIRPa, which can downregulate CD47 expression at the cell surface of cancer cells or can directly block the CD47-SIRPa interaction; molecules that inhibit the activity of the enzyme indoleamine-2,3-dioxygenase (IDO); molecules that block natural killer (NK) cell checkpoints including, but not limited to, KIR2DL1-3, KIR3DL1, and CD94/NKG2A; and ligands or other agonists of TNF family members including, but not limited to, CD40, 4-1BB, OX40, ICOS, CD27, TL-1A, TRAIL, FAS, and GITR. Complexes are formed by chemical conjugation with a cleavable or stable linker, recombinant expression as a fusion with a cleavable or stable linker, co-formulation in a liposome, or complexes of a peptide with an expression vector encoding for the I/O formulated in a liposome.

[0482] Initial in vitro screening is carried out to assess how efficiently a peptide is able to deliver an I/O to the appropriate compartment (i.e., extracellular for IL-15 agents and 4-1BB ligands and intracellular for RIG-I ligands and STING ligands) as compared to free I/O. Subsequent in vivo screening is carried out to identify a lead I/O. Peptide-I/O complexes are compared in vivo to the peptide alone, empty liposomes, and free I/O. In vitro and in vivo results are analyzed to identify peptide-I/O complexes, which induce the greatest tumor regression as opposed to free I/O.

### Example 45

### In Vivo Tumor Activity

[0483] This example describes the experimental design to show that a peptide-I/O complex of the present disclosure will effectively treat an established tumor in a mouse. A tumor cell line is implanted, in one of various tissues, including subcutaneous, intravenous (metastasis), or orthotopic. The tumor is allowed time to establish, for example, a few days or weeks. The mouse is treated with the drug by one of various routes of administration, for example, intravenous, subcutaneous, intratumoral, or intraperitoneal. The drug is administered once or several times over the period of the experiment. The size of the tumor is monitored until untreated mice are terminated due to tumor growth. When available, mice with targeted gene deletions or knockouts are used to verify a mechanism of action. Alternatively, tumors with gene knockouts are also used. Pharmacodynamic biomarkers are used to measure I/O-related biological effects and to further indicate a mechanism of I/O action. Mice administered peptide-I/O complexes are compared to free I/O to assess the enhancement in efficacy obtained by complexing the I/O with a peptide of the present disclosure.

[0484] For example, the therapeutic model 4T1 is an aggressive mammary tumor of the mouse (Oh et al., Oncotarget. 2017 Jan. 17;8(3):4730-4746, Chandra et al., Cancer Immunol Res. 2014 September;2(9):901-10, Calderon et al., Bioconjug Chem. 2017 Feb. 15;28(2):461-470, Kim et al., Oncotarget. 2016 Mar. 29;7(13):16130-45). It is implanted orthotopically in the mammary fat pad where it grows and metastasizes. Mice are rested until the tumor reaches a palpable size (50-100 mm³), usually about 7d post implantation. The mice are randomly assigned to the treated or untreated groups. The treatment group gets I/O or peptide-I/O complexes on each of three days, for example day 0, 7, and 14. Treatments can also be administered more frequently, for example every 2 days, 3 times per week, 4 times per week, or daily, until a certain experimental day or until mice are euthanized. Tumor growth is monitored, for example, daily, and mice are euthanized as the tumor reaches 1000 mm³. Prior to study termination, lymphoid tissues (spleen and lymph nodes) are harvested from mice of each group, and analyzed for immune responses against the tumor, by stimulating those cells in vitro with irradiated or mitomycin C treated 4T1 cells. The cultured cells are assayed after 18-24 hours for production of key mediators such as chemokines and cytokines, using multiplex assays. Tumors and draining lymph nodes are further evaluated for the presence of immune cells such as CD4 and CD8 T cells, DCs, NKs, B cells, Tregs, memory T cells, and myeloid suppressor cells. Expression of activation markers, such as CD69, CD80, and CD86, is measured on the immune cells. The expression of secreted cytokines in these cells is measured by intracellular staining with antibodies to the cytokines. Anti-tumor immune responses are measured in vitro by the secretion of cytokines in response of lymphocytes to the tumor cells, or to known antigenic peptides. Serum cytokine levels are measured to assess systemic immune activation. Circulating anti-tumor antibodies are measured. Immunohistochemistry of the tumor is used to evaluate infiltrating immune cells as well as the expression of relevant proteins in the tumor. The tumor tissue is also evaluated for the presence of the I/O or the peptide-I/O complex. In addition to growth of the primary tumor, 4T1 is a metastatic tumor. Metastases are counted in the draining lung, lymph nodes, liver and spleen. Reduction in the number and/or size of metastases indicates that the peptide-I/O complex has induced systemic immunity to the tumor. Treatment with some peptide-I/O complexes will act directly on the tumor cell to induce apoptosis. This can be measured in vitro by immunocytochemistry by evaluating the expression of key apoptosis mediators such as the Tunel assay, or detection of caspases 3, 8, and 9. In one version of the 4T1 model, (Wu et al., R Soc Open Sci. 2017 Oct. 25;4(10): 170822), the tumor cells have been engineered to express GFP and luciferase. This allows the detection of tumor cells circulating in the blood, and the measurement of tumors by whole body imaging.

[0485] The same methods described for the 4T1 mammary tumor model above are also used for other tumor models, for example, the Colon tumor models CT26 (Kim et al, Oncotarget. 2016 Mar. 29;7(13): 16130-45) and MC38 (Fallon et al. Oncotarget. 2017 Mar. 28;8(13):20558-20571), pancreatic tumor models MIAPaCa-2, and PANC-1 (Duewell et al., Oncoimmunology. 2015 Apr. 14;4(10): e1029698) and PANC-02 (Duewell et al., Cell Death Differ. 2014 December;21(12): 1825-37), the melanoma model B16F10 (Kubo et al., Cancer Immunol Res. 2017 September;5(9):812-820, Demaria et al., Proc Natl Acad Sci USA. 2015 Dec. 15;112(50): 15408-13), the prostate tumor model TRAMP-C2 (Fu et al., Sci Transl Med. 2015 Apr. 15;7(283):283ra52), the bladder tumor model MB49 (Fallon et al. Oncotarget. 2017 Mar. 28;8(13):20558-20571), myeloma models MOPC-315 and 5T33P (Xu et al., Cancer Res. 2013 May 15;73(10):3075-86), AML model C1498 (Curran et al., Cell Rep. 2016 Jun. 14;15(11):2357-66), the mammary tumor model TSA, and the mouse lung cancer models LLC and TC-1 (Yang 2016). These subcutaneous tumor models are useful to study abscopal effects, using bilateral tumors, only one of which receives intratumoral treatment. Treatment effects on the contralateral tumor reflect the induction of antitumor immunity. Induction of anti-tumor immunity can also be confirmed in mice that have survived tumor implantation by re-challenge of the surviving mice with tumor and showing survival without any retreatment (Xu et al., Cancer Res. 2013 May 15;73(10):3075-86, Curran et al., Cell Rep. 2016 Jun. 14;15(11):2357-66). B16F10 also provides a metastatic model, in which tumor cells are injected IV and metastatic lesionsare counted in the lungs (Demaria et al., Proc Natl Acad Sci USA. 2015 Dec. 15;112(50): 15408-13). Reduction in the number and/or size of metastases indicates that the peptide-I/O complex has induced systemic immunity to the tumor. Human tumor xenografts can be grown in scid mice, such as the human B cell lymphoma Daudi (Liu et al., J Biol Chem. 2016 Nov. 11;291(46):23869-23881) and the human prostate tumor PC3 (Liu et al., J Control Release. 2016 Oct. 10; 239:223-30). I/Os that stimulate NK cells or other innate immune mechanisms are also tested in this model.

[0486] In some instances, the peptide-I/O complex can be administered to a subject with a primary tumor for which surgical resection is planned. The subject can be a human or non-human animal. Following a sufficient period for an immune response to develop, the primary tumor is excised. The subject is monitored for local or distant recurrence.

### Example 46

Combination Treatment with a Peptide-I/O Complex

[0487] This example describes combination treatment with a peptide-I/O complex. A peptide-I/O complex of the present disclosure is given to a subject in combination with another therapeutic to achieve improved efficacy compared to administration of either the peptide-I/O complex or the other therapeutic alone. The other therapeutic is a checkpoint inhibitor such as anti-PD1, anti-PDL1 or anti-CTLA4, anti-CD40, IL-12, a therapeutic antibody such as cetuximab, rituximab, or trastuzumab, a cancer vaccine, GM-CSF, a chemotherapeutic such as 5-fluorouracil or cyclophosphamide, radiation therapy, or other cancer therapeutic. Improved efficacy of combination therapy is demonstrated by comparing individual treatments with the combination treatment in vitro and in vivo, as described in Example 38 and Example 45.

### Example 47

### Prophylactic Tumor Models

[0488] This example describes prophylactic tumor models for assessing immunogenic cell death (ICD) inducing I/Os. The model can, optionally, be tested using B16F10 cells as a melanoma model. Anti-tumor immune responses are examined by prophylactic treatment of mice with ICD-inducing I/O treated tumor cells. I/Os that induce apoptosis of tumor cells can lead to ICD, in which tumor cells can release signals such as reactive oxygen species (ROS), calreticulin and HMGB1, and is dependent on caspase activity, and tumor antigens, which recruit and active dendritic cells. Mature dendritic cells go on to stimulate T cells and, thereby, facilitate anti-tumor immune responses.

[0489] Tumor cells are treated in vitro with any I/O of the present disclosure (e.g., RIG-I ligand or a STING ligand each of which acting as an agonist, as described in Example 38 and EXAMPLE 39) and treated cells are administered to a subject. The subject is a mouse. Days or weeks post-administration, live tumor cells are administered to mice. Alternatively, live tumor cells are administered simultaneously with administration of treated cells. Treated tumor cells begin undergoing ICD, which is induced by the I/O. The induced ICD facilitates mounting of a potent anti-tumor immune responses in mice. The existence and specificity of anti-tumor immunity is evaluated by challenging surviving mice with the same tumor cells or different tumor cells. Several tumors have been used to successfully investigate ICD, including CT26, Panc-02, and TC-1 and EL4.

### Example 48

### Peptide-I/O Complex Homing to a Tumor

[0490] This example illustrates peptide-I/O complex homing to tumors in humans or animals with cancer. A peptide-I/O complex of the present disclosure is expressed recombinantly or chemically synthesized and is used directly, after radiolabeling, or after conjugation to a fluorophore. A peptide is selected from any one of the peptides of SEQ ID NO: 1-SEQ ID NO: 1134, SEQ ID NO: 1243-SEQ ID NO: 1262, or SEQ ID NO: 1263-SEQ ID NO: 1316. The peptide-I/O complex is administered to a human or animal subcutaneously, intravenously, intratumorally, intramuscularly, intraperitoneally, intradermally, or orally. The peptide-I/O complex homes to the tumor, accumulates in the tumor, is retained by the tumor, is processed by the tumor or its microenvironment, is present in the tumor at higher levels or longer than the I/O alone, or is otherwise preferentially located in the tumor.

### Example 49

### Intracellular Penetration of a Peptide-I/O Complex

[0491] This example illustrates intracellular penetration of a peptide-I/O complex in humans or animals with cancer. A peptide-I/O complex of the present disclosure is expressed recombinantly or chemically synthesized and is used directly, after radiolabeling, or after conjugation to a fluorophore. A peptide is selected from any one of the peptides of SEQ ID NO: 1-SEQ ID NO: 1134, SEQ ID NO: 1243-SEQ ID NO: 1262, or SEQ ID NO: 1263-SEQ ID NO: 1316. The peptide-I/O complex is administered to a human or animal subcutaneously, intravenously, intratumorally, intramuscularly, intraperitoneally, intradermally, or orally. The peptide-I/O complex penetrates the cell membrane to access intracellular compartments at higher levels or longer than the I/O alone.

### Example 50

### Peptide-I/O Complex Homing to Tumor in Non-Human Animals

[0492] This example illustrates a peptide-I/O complex of this disclosure homing to tumors in non-human animals. Non-human animals include but are not limited to guinea pigs, rabbits, dog, cats, horses, rats, mice, cows, pigs, non-human primates, and other non-human animals. A peptide-I/O complex of the present disclosure is expressed recombinantly or chemically synthesized and is used directly, after radiolabeling, or after conjugation to a fluorophore. The peptide is selected from any one of the peptides SEQ ID NO: 1-SEQ ID NO: 1134, SEQ ID NO: 1243-SEQ ID NO: 1262, or SEQ ID NO: 1263-SEQ ID NO: 1316. The resulting peptide-I/O complex is administered to a non-human animal subcutaneously, intravenously, or orally, or is injected directly into a tumor. Biodistribution is assessed by LC/MS, autoradiography, positron emission tomography (PET), scintillation counting, immunohistochemistry, or fluorescence imaging. A peptide-I/O complex is homed to tumors, accumulates in the tumor, is retained by the tumor, is processed by the tumor or its microenvironment, is present in the tumor at higher levels or longer than the I/O alone, or is otherwise preferentially located in the tumor in non-human animals.

### Example 51

### Peptide-I/O Complex Crossing the Blood Brain Barrier and Homing to the Brain

[0493] This example shows the peptide-I/O complex crossing the blood brain barrier (BBB) and/or the blood cerebral spinal fluid (CSF) barrier, and in some cases homing to tumors within the central nervous system (CNS). A peptide-I/O complex of the present disclosure is expressed recombinantly or chemically synthesized and is used directly, after radiolabeling, or after conjugation to a fluorophore and dosed in an animal. At the end of the dosing period, mice are frozen in a hexane/dry ice bath and then frozen in a block of carboxymethylcellulose. Thin, frozen sections of whole animal sagittal slices that include the brain, tumor, liver, kidney, lung, heart, spleen, pancreas, muscle, adipose, gall bladder, upper gastrointestinal tract, lower gastrointestinal tract, bone, bone marrow, reproductive track, eye, cartilage, stomach, skin, spinal cord, bladder, salivary gland, and other types of tissues are obtained with a microtome, allowed to dessicate in a freezer, and exposed to phosphoimager plates for about ten days.

[0494] These plates are developed, and the signal (such as radioactivity or fluorescence) from each organ is normalized to the signal found in the heart blood or other tissue of each animal. A signal in tissue darker than the signal expected from blood in that tissue indicates accumulation in a region, tissue, structure or cell.

### Example 52

### Whole Body Autoradiography of Homing Peptides

[0495] This example illustrates whole body autoradiography of peptide homers of this disclosure. Peptides are radiolabeled by methylating lysines at the N-terminus as described in Example 3. As such, the peptide can contain methyl or dimethyl lysines and a methylated or dimethlyated amino terminus. A dose of 100 nmol radiolabeled peptide is administered via tail vein injection in Female Harlan athymic nude mice, weighing 20-25 g. The experiment is done in at least duplicate (n=2 animals per group). In some animals, kidneys are ligated to prevent renal filtration of the radiolabled peptides and extend plasma half-life. Each radiolabeled peptide is allowed to freely circulate within the animal for the described time period before the animals were euthanized and sectioned.

[0496] Whole body autoradiography (WBA) sagittal sectioning is performed as follows. At the end of the dosing period, mice are frozen in a hexane/dry ice bath and then embedded in a frozen block of carboxymethylcellulose. Whole animal sagittal slices are prepared that resulted in thin frozen sections for imaging. Thin frozen sections are obtained using a microtome and allowed visualization of tissues such as brain, tumor, liver, kidney, lung, heart, spleen, pancreas, muscle, adipose, gall bladder, upper gastrointestinal tract, lower gastrointestinal tract, bone, bone marrow, reproductive tract, eye, cartilage, stomach, skin, spinal cord, bladder, salivary gland, and more. Sections are allowed to dessicate in a freezer prior to imaging.

[0497] For the autoradiography imaging, tape mounted thin sections are freeze dried and radioactive samples were exposed to phophoimager plates for 7 days. These plates are developed and the signal (densitometry) from each organ was normalized to the signal found in the cardiac blood of each animal. A signal in tissue darker than the signal expected from blood in that tissue indicates accumulation in a region, tissue, structure, or cell.

### Example 53

### Peptide-I/O Complex Localization in Tumors

[0498] This example illustrates binding of peptide-I/O complexes of this disclosure to cells within tumors in animals with intact kidneys. In one embodiment, animals are dosed and are processed as described in Example 6 and Example 7. At the end of the dosing period, animals are euthanized and the tumor is optionally removed for use in staining and imaging procedures. Whole animal sagittal slices are prepared that result in thin frozen sections being available for staining and imaging. A peptide-I/O complex of this disclosure is found to localize to the tumor microenvironment, localized intracellularly by tumor cells or extracellularly bound or both. Localization is visualized and confirmed by microscopy. Optionally, a peptide-I/O complex of this disclosure is found to penetrate the tumor.

[0499] In another embodiment, peptide-I/O complexes of this disclosure are administered in humans and are localized on or in tumor cells.

### Example 54

### Peptide-Fc Protein Fusions

[0500] This example illustrates making and using peptide-I/O complexes as fusions with Fc protein. A peptide of any one of SEQ ID NO: 1-SEQ ID NO: 1134, SEQ ID NO: 1243-SEQ ID NO: 1262, or SEQ ID NO: 1263-SEQ ID NO: 1316 is recombinantly expressed by fusing at the N-terminus or the C-terminus of the sequence for the human IgG1 Fc protein in HEK293 or CHO cells to yield a sequence of SEQ ID NO: 1230 (METDTLLLWVLLLWVPGSTGXXXXXXXXXXXX XXXXXX XXXXXXXXXXXXXXXXXXXXXXXXXXXXXXXXXGGSGGSDKTHTCPPCPAPELLGGPS VFLFPPKPKDTLMISRTPEVTCVVVDVSHEDPEVKFNWYVDGVEVHNAKTKPREEQYNST YRVVSVLTVLHQDWLNGKEYKCKVSNKALPAPIEKTISKAKGQPREPQVYTLPPSRDELTK NQVSLTCLVKGFYPSDIAVEWESNGQPENNYKTTPPVLDSDGSFFLYSKLTVDKSRWQQGN VFSCSVMHEALHNHYTQKSLSLSPGK, where X is any peptide of the present disclosure including any one of SEQ ID NO: 1-SEQ ID NO: 1134, SEQ ID NO: 1243-SEQ ID NO: 1262, or SEQ ID NO: 1263-SEQ ID NO: 1316).

[0501] A peptide of any one of SEQ ID NO: 1-SEQ ID NO: 1134, SEQ ID NO: 1243-SEQ ID NO: 1262, or SEQ ID NO: 1263-SEQ ID NO: 1316 is recombinantly expressed by fusing at the N-terminus or the C-terminus of the sequence for the human IgG1 Fc protein in HEK293 or CHO cells to yield a sequence of METDTLLLWVLLLWVPGSTGXXXXXXXXXXXXXXXXXXXXXXXXX XXXXXXXXXXXXXXXXXXXXXXXXXEPKSCDKTHTCPPCPAPELLGGPSVFL FPPKPKDTLMISRTPEVTCVVVDVSHEDPEVKFNWYVDGVEVHNAKTKPREEQYNSTYRV VSVLTVLHQDWLNGKEYKCKVSNKALPAPIEKTISKAKGQPREPQVYTLPPSRDELTKNQV SLTCLVKGFYPSDIAVEWESNGQPENNYKTTPPVLDSDGSFFLYSKLTVDKSRWQQGNVFS CSVMHEALHNHYTQKSLSLSPGK (SEQ ID NO: 1493), where X is any peptide of the present disclosure including any one of SEQ ID NO: 1-SEQ ID NO: 1134, SEQ ID NO: 1243-SEQ ID NO: 1262, or SEQ ID NO: 1263-SEQ ID NO: 1316).

[0502] A recombinantly expressed peptide fused at the N-terminus or the C-terminus of the sequence for the human IgG1 Fc protein in HEK293 or CHO cells can yield a sequence of

(SEQ ID NO: 1494)
METDTLLLWVLLLWVPGSTGGSGVPINVRCRGSRDCLDPCRRAGMREGRC
INSRCHCTPGGSGGSDKTHTCPPCPAPELLGGPSVFLEPPKPKDTLMISR
TPEVTCVVVDVSHEDPEVKENWYVDGVEVHNAKTKPREEQYNSTYRVVSV
LTVLHQDWLNGKEYKCKVSNKALPAPIEKTISKAKGQPREPQVYTLPPSR
DELTKNQVSLTCLVKGFYPSDIAVEWESNGQPENNYKTTPPVLDSDGSFF
LYSKLTVDKSRWQQGNVFSCSVMHEALHNHYTQKSLSLSPGK.

[0503] The sequence of any peptide of this disclosure is expressed as a fusion protein with either murine or human Fc by adding a secretion signal sequence to the N-terminus and an Fc sequence to the C-terminus. This creates a bivalent molecule with improved secretion and/or pharmacokinetic properties. The larger peptide-Fc fusion is expressed in different mammalian or insect cell lines and is useful as a research reagent and a therapeutic.

[0504] Any peptide of this disclosure is co-expressed with Fc protein to yield Fc-fusion peptides with longer half-life and improved homing to tumor. In SEQ ID NO: 1230, the secretion signal sequence METDTLLLWVLLLWVPGSTG (SEQ ID NO: 1231) is followed by peptide of any one of SEQ ID NO: 1-SEQ ID NO: 1134, SEQ ID NO: 1243-SEQ ID NO: 1262, or SEQ ID NO: 1263-SEQ ID NO: 1316, and is followed by the sequence for Fc protein. Cleaving can be imprecise, resulting in cleavage at position 20 or position 21 of SEQ ID NO: 1230. The peptide-Fc fusion is then chemically conjugated to or formulated with an I/O of the present disclosure or the peptide-Fc fusion is recombinantly expressed with an I/O of the present disclosure.

### Example 55

### Peptide Conjugate Cleavage

[0505] This example describes preparation of peptide-I/O complexes having tunable cleavage rates. The peptide-I/O complexes are synthesized or expressed with the modification that chemical structures are used to provide steric hindrance to cleavage or an altered local environment at the point of cleavage (for both chemical cleavage such as hydrolysis as well as for enzymatic cleaveage). In one exemplary conjugate, the peptide-I/O complex is synthesized with one or more methyl groups in close proximity to the cleavable bond to generate steric hindrance, which causes a decreased rate of cleavage. In another exemplary conjugate, one methyl group is present at the adjacent carbon. In another exemplary conjugate, two methyl groups are present at the adjacent carbon. In another exemplary conjugate, one ethyl group is present at the adjacent carbon. In another exemplary conjugate, two ethyl groups are present at the adjacent carbon. In another exemplary conjugate, a cyclic group is present near the site of cleavage. In another exemplary conjugate, the carbon linker length is increased, increasing the local hydrophobicity and lowering the hydrolysis rate. In another exemplary conjugate, a hydroxyl group is located on the adjacent carbon, increasing the local hydrophilicity and increasing the cleavage rate. The rate of cleavage in these exemplary conjugates is therefore adjusted, preventing premature cleavage and ensuring that the more of peptide-I/O complexes accumulate at the desired site in the body or in the cell prior to releasing the active I/O but that the I/O is also released in the tumor microenvironment in a timely manner.

[0506] The resulting peptide-I/O complexes are administered to a human or animal intravenous, subcutaneous, intranasal, oral, intraperitoneal, intramuscular, intradermal, or by intratumoral injection to treat disease.

### Example 56

### Intra-tumoral Administration of Peptides and Peptide Conjugates

[0507] This example illustrates intra-tumoral administration of peptide-I/O complexes of this disclosure. A peptide of this disclosure is expressed recombinantly or chemically synthesized. In some cases, the peptide is subsequently conjugated to an I/O, is recombinantly expressed with an I/O agent, or is formulated with an I/O. The peptide or peptide conjugate is administered to a subject in need thereof via intra-tumoral administration. The tumor is penetrated by the peptide-I/O complexes due to the small size of the peptide-I/O complexes, and due to binding of tumor components by the peptide-I/O complexes. The peptide-I/O complexes is bound to tumor and the residence time in the tumor is longer due to this binding. Optionally, the injected material is aggregated, is crystallized, or complexes are formed, further extending the depot effect and contributing to longer residence time.

[0508] The peptide can be any peptide with the sequence selected from SEQ ID NO: 1-SEQ ID NO: 1134, SEQ ID NO: 1243-SEQ ID NO: 1262, or SEQ ID NO: 1263-SEQ ID NO: 1316. Such peptide-drug conjugates can be made using either a cleavable or stable linker as described herein (e.g., EXAMPLES 8 and 9).

### Example 57

Treatment of a Brain Tumor with a Peptide-I/O Complex

[0509] This example illustrates treatment of a brain tumor using peptide-I/O complexes of the present disclosure. A peptide of the present disclosure is recombinantly expressed or chemically synthesized and are used directly, after conjugation to an I/O. The peptide-I/O complex is administered in a pharmaceutical composition to a subject as a therapeutic for the brain tumor. One or more peptide-I/O complexes of the present disclosure are administered to a subject. A subject can be a human or an animal. The pharmaceutical composition is administered subcutaneously, intravenously, orally, or injected directly into a tumor. The administered peptide-I/O complexes target brain tumor-affected tissues and cells thereof.

[0510] In addition, many chemotherapeutics do not cross the blood-brain barrier. A peptide of the disclosure is expressed recombinantly or chemically synthesized and then is conjugated to an I/O, directly or via a cleavable or stable linker. Coupling of the I/O to any one of the peptides of SEQ ID NO: 1-SEQ ID NO: 1134, SEQ ID NO: 1243-SEQ ID NO: 1262, or SEQ ID NO: 1263-SEQ ID NO: 1316 targets the I/O into the brain and to the tumor. One or more peptide-I/O complexes are administered to a human or animal.

[0511] The peptide is any peptide with the sequence selected from SEQ ID NO: 1-SEQ ID NO: 1134, SEQ ID NO: 1243-SEQ ID NO: 1262, or SEQ ID NO: 1263-SEQ ID NO: 1316. Such peptide-drug conjugates can be made using either a cleavable or stable linker as described herein (e.g., EXAMPLES 8 and 9).

### Example 58

Treatment of Breast Cancer with a Peptide-I/O Complex

[0512] This example illustrates treatment of breast cancer using peptide-I/O complexes of the present disclosure. A peptide of the present disclosure is recombinantly expressed or chemically synthesized and are used directly, after conjugation to an I/O. The peptide-I/O complex is administered in a pharmaceutical composition to a subject as a therapeutic for breast cancer. One or more peptide-I/O complexes of the present disclosure are administered to a subject. A subject can be a human or an animal. The pharmaceutical composition is administered subcutaneously, intravenously, orally, or injected directly into a tumor. The administered peptide-I/O complexes target breast cancer-affected tissues and cells thereof.

[0513] The peptide is any peptide with the sequence selected from SEQ ID NO: 1-SEQ ID NO: 1134, SEQ ID NO: 1243-SEQ ID NO: 1262, or SEQ ID NO: 1263-SEQ ID NO: 1316. Such peptide-drug conjugates can be made using either a cleavable or stable linker as described herein (e.g., EXAMPLES 8 and 9).

### Example 59

Treatment of Melanoma with a Peptide-I/O Complex

[0514] This example illustrates treatment of melanoma using peptide-I/O complexes of the present disclosure. A peptide of the present disclosure is recombinantly expressed or chemically synthesized and are used in a complex with an I/O. The peptide-I/O complex is administered in a pharmaceutical composition to a subject as a therapeutic for melanoma. One or more peptide-I/O complexes of the present disclosure are administered to a subject. A subject can be a human or an animal. The pharmaceutical composition is administered subcutaneously, intravenously, orally, or injected directly into a tumor. The administered peptide-I/O complexes target melanoma-affected tissues and cells thereof.

[0515] The peptide is any one of SEQ ID NO: 1-SEQ ID NO: 1134, SEQ ID NO: 1243-SEQ ID NO: 1262, or SEQ ID NO: 1263-SEQ ID NO: 1316. Such peptide-I/O complexes can be made using either a cleavable or stable linker as described herein (e.g., EXAMPLES 8 and 9).

### Example 60

Treatment of Sarcoma with a Peptide-I/O Complex

[0516] This example illustrates treatment of sarcoma using peptide-I/O complexes of the present disclosure. A peptide of the present disclosure is recombinantly expressed or chemically synthesized and are used directly, after conjugation to an I/O. The peptide-I/O complex is administered in a pharmaceutical composition to a subject as a therapeutic for sarcoma. One or more peptide-I/O complexes of the present disclosure are administered to a subject. A subject can be a human or an animal. The pharmaceutical composition is administered subcutaneously, intravenously, orally, or injected directly into a tumor. The administered peptide-I/O complexes target sarcoma-affected tissues and cells thereof.

[0517] The peptide is any peptide with the sequence selected from SEQ ID NO: 1-SEQ ID NO: 1134, SEQ ID NO: 1243-SEQ ID NO: 1262, or SEQ ID NO: 1263-SEQ ID NO: 1316. Such peptide-drug conjugates can be made using either a cleavable or stable linker as described herein (e.g., EXAMPLES 8 and 9).

### Example 61

Treatment of a Brain Tumor with a Peptide-I/O Complex

[0518] This example describes the treatment of a brain tumor with a peptide-I/O complex. Many chemotherapeutics do not cross the blood-brain barrier. A peptide of the disclosure is expressed recombinantly or chemically synthesized and then is conjugated to an I/O, directly or via a cleavable or stable linker. Coupling of the I/O to any one of the peptides of SEQ ID NO: 1-SEQ ID NO: 1134, SEQ ID NO: 1243-SEQ ID NO: 1262, or SEQ ID NO: 1263-SEQ ID NO: 1316 targets the I/O into the brain and to the tumor. One or more peptide-I/O complexes are administered to a human or animal.

### Example 62

Treatment of Ewing's Sarcoma with a Peptide-I/O Complex

[0519] This example describes the use of the peptide-I/O complexes described herein to treat Ewing's Sarcoma. A peptide of the disclosure is expressed recombinantly or chemically synthesized and then is conjugated to an I/O, directly or via a cleavable or stable linker. Coupling of the I/O to the peptide of any one of SEQ ID NO: 1-SEQ ID NO: 1134, SEQ ID NO: 1243-SEQ ID NO: 1262, or SEQ ID NO: 1263-SEQ ID NO: 1316 targets the drug to Ewing's Sarcoma. One or more peptide-I/O complexes are administered to a human or animal.

### Example 63

Treatment of Glioblastoma with a Peptide-I/O Complex

[0520] This example describes the use of the peptide-I/O complexes described herein to treat glioblastoma. A peptide of the disclosure is expressed recombinantly or chemically synthesized and then is conjugated to an I/O, directly or via a cleavable or stable linker. Coupling of the I/O to the peptide of any one of SEQ ID NO: 1-SEQ ID NO: 1134, SEQ ID NO: 1243-SEQ ID NO: 1262, or SEQ ID NO: 1263-SEQ ID NO: 1316 targets the drug to the glioblastoma. One or more peptide-I/O complexes are administered to a human or animal.

### Example 64

Treatment of Triple-Negative Breast Cancer with a Peptide-I/O Complex

[0521] This example describes the use of the peptide-I/O complexes described herein to treat triple-negative breast cancer. A peptide of the disclosure is expressed recombinantly or chemically synthesized and then is conjugated to an I/O complex, directly or via a cleavable or stable linker. Coupling of the I/O to the peptide of any one of SEQ ID NO: 1-SEQ ID NO: 1134, SEQ ID NO: 1243-SEQ ID NO: 1262, or SEQ ID NO: 1263-SEQ ID NO: 1316 targets the drug to the triple-negative breast cancer. One or more peptide-I/O complexes are administered to a human or animal.

### Example 65

Treatment of Non-Brain Cancer with a Mutated Peptide

[0522] This example describes peptide-I/O complexes used to treat a non-brain cancer. A peptide of the disclosure is mutated. This mutation prevents the mutated peptide from crossing the blood brain barrier. The mutated peptide expressed recombinantly or chemically synthesized and then is conjugated to an I/O agent, directly or via a cleavable or stable linker. Coupling of the I/O to the mutated peptide of any one of SEQ ID NO: 1-SEQ ID NO: 1134, SEQ ID NO: 1243-SEQ ID NO: 1262, or SEQ ID NO: 1263-SEQ ID NO: 1316 targets the drug to a non-brain cancer. For example, the mutated peptide-I/O complexes are targeted to cancer non-brain cancer. One or more peptide-I/O complexes are administered to a human or animal.

### Example 66

Treatment of Head and Neck Cancer with a Peptide-RIG-I Ligand Complex

[0523] This example describes treatment of head and neck cancer with any peptide of the present disclosure (e.g., any one of SEQ ID NO: 1-SEQ ID NO: 1134, SEQ ID NO: 1243-SEQ ID NO: 1262, or SEQ ID NO: 1263-SEQ ID NO: 1316) conjugated to an I/O disclosed herein. The I/O is a RIG-I ligand. The peptide is recombinantly expressed or chemically synthesized and is conjugated to the RIG-I ligand as described in Example 12, Example 13, Example 15, EXAMPLE 16, or Example 17. The peptide-RIG-I ligand complex is administered to a subject. The subject is a human or an animal and has head and neck cancer. Administration is intravenous, subcutaneous, intranasal, oral, intraperitoneal, intramuscular, intradermal, or by intratumoral injection. Upon administration, the peptide-RIG-I ligand complex is targeted to cancerous tissues and cells thereof. The complex is internalized by cancer cells and results in immunogenic cell death, followed by an immune response that reduces or eradicates the cancer, as described in Example 38 and exhibits in vivo responses, as described in Example 45.

### Example 67

Treatment of Head and Neck Cancer with a Peptide-STING Ligand Complex

[0524] This example describes treatment of head and neck cancer with any peptide of the present disclosure (e.g., any one of SEQ ID NO: 1-SEQ ID NO: 1134, SEQ ID NO: 1243-SEQ ID NO: 1262, or SEQ ID NO: 1263-SEQ ID NO: 1316) conjugated to an I/O disclosed herein. The I/O is a STING ligand. The peptide is recombinantly expressed or chemically synthesized and is conjugated to the STING ligand as described in Example 12, Example 13, Example 15, EXAMPLE 16, or Example 17. The peptide-STING ligand complex is administered to a subject. The subject is a human or an animal and has head and neck cancer. Administration is intravenous, subcutaneous, intranasal, oral, intraperitoneal, intramuscular, intradermal, or by intratumoral injection. Upon administration, the peptide-STING ligand complex is targeted to cancerous tissues and cells thereof. The complex is internalized by cancer cells and results in immunogenic cell death, followed by an immune response that reduces or eradicates the cancer, as described in Example 38 and exhibits in vivo responses, as described in Example 45.

### Example 68

Treatment of Lung Cancer with a Peptide-RIG-I Ligand Complex

[0525] This example describes treatment of lung cancer with any peptide of the present disclosure (e.g., any one of SEQ ID NO: 1-SEQ ID NO: 1134, SEQ ID NO: 1243-SEQ ID NO: 1262, or SEQ ID NO: 1263-SEQ ID NO: 1316) conjugated to an I/O disclosed herein. The I/O is a RIG-I ligand. The peptide is recombinantly expressed or chemically synthesized and is conjugated to the RIG-I ligand as described in Example 12, Example 13, Example 15, Example 16, or Example 17. The peptide-RIG-I ligand complex is administered to a subject. The subject is a human or an animal and has lung cancer. Administration is intravenous, subcutaneous, intranasal, oral, intraperitoneal, intramuscular, intradermal, or by intratumoral injection. Upon administration, the peptide-RIG-I ligand complex is targeted to cancerous tissues and cells thereof. The complex is internalized by cancer cells and results in immunogenic cell death, followed by an immune response that reduces or eradicates the cancer, as described in Example 38 and exhibits in vivo responses, as described in Example 45.

### Example 69

Treatment of Lung Cancer with a Peptide-STING Ligand Complex

[0526] This example describes treatment of lung cancer with any peptide of the present disclosure (e.g., any one of SEQ ID NO: 1-SEQ ID NO: 1134, SEQ ID NO: 1243-SEQ ID NO: 1262, or SEQ ID NO: 1263-SEQ ID NO: 1316) conjugated to an I/O disclosed herein. The I/O is a STING ligand. The peptide is recombinantly expressed or chemically synthesized and is conjugated to the STING ligand as described in Example 12, Example 13, Example 15, Example 16, or Example 17. The peptide-STING ligand complex is administered to a subject. The subject is a human or an animal and has lung cancer. Administration is intravenous, subcutaneous, intranasal, oral, intraperitoneal, intramuscular, intradermal, or by intratumoral injection. Upon administration, the peptide-STING ligand complex is targeted to cancerous tissues and cells thereof. The complex is internalized by cancer cells and results in immunogenic cell death, followed by an immune response that reduces or eradicates the cancer, as described in Example 38 and exhibits in vivo responses, as described in Example 45.

### Example 70

Treatment of Renal Cell Carcinoma with a Peptide-RIG-I Ligand Complex

[0527] This example describes treatment of renal cell carcinoma with any peptide of the present disclosure (e.g., any one of SEQ ID NO: 1-SEQ ID NO: 1134, SEQ ID NO: 1243-SEQ ID NO: 1262, or SEQ ID NO: 1263-SEQ ID NO: 1316) conjugated to an I/O disclosed herein. The I/O is a RIG-I ligand. The peptide is recombinantly expressed or chemically synthesized and is conjugated to the RIG-I ligand as described in Example 12, Example 13, Example 15, EXAMPLE 16, or Example 17. The peptide-RIG-I ligand complex is administered to a subject. The subject is a human or an animal and has renal cell carcinoma. Administration is intravenous, subcutaneous, intranasal, oral, intraperitoneal, intramuscular, intradermal, or by intratumoral injection. Upon administration, the peptide-RIG-I ligand complex is targeted to cancerous tissues and cells thereof. The complex is internalized by cancer cells and results in immunogenic cell death, followed by an immune response that reduces or eradicates the cancer, as described in Example 38 and exhibits in vivo responses, as described in Example 45.

### Example 71

Treatment of Renal Cell Carcinoma with a Peptide-STING Ligand Complex

[0528] This example describes treatment of renal cell carcinoma with any peptide of the present disclosure (e.g., any one of SEQ ID NO: 1-SEQ ID NO: 1134, SEQ ID NO: 1243-SEQ ID NO: 1262, or SEQ ID NO: 1263-SEQ ID NO: 1316) conjugated to an I/O disclosed herein. The I/O is a STING ligand. The peptide is recombinantly expressed or chemically synthesized and is conjugated to the STING ligand as described in Example 12, Example 13, Example 15, EXAMPLE 16, or Example 17. The peptide-STING ligand complex is administered to a subject. The subject is a human or an animal and has renal cell carcinoma. Administration is intravenous, subcutaneous, intranasal, oral, intraperitoneal, intramuscular, intradermal, or by intratumoral injection. Upon administration, the peptide-STING ligand complex is targeted to cancerous tissues and cells thereof. The complex is internalized by cancer cells and results in immunogenic cell death, followed by an immune response that reduces or eradicates the cancer, as described in Example 38 and exhibits in vivo responses, as described in Example 45.

### Example 72

Treatment of Lymphoma with a Peptide-RIG-I Ligand Complex

[0529] This example describes treatment of lymphoma with any peptide of the present disclosure (e.g., any one of SEQ ID NO: 1-SEQ ID NO: 1134, SEQ ID NO: 1243-SEQ ID NO: 1262, or SEQ ID NO: 1263-SEQ ID NO: 1316) conjugated to an I/O disclosed herein. The I/O is a RIG-I ligand. The peptide is recombinantly expressed or chemically synthesized and is conjugated to the RIG-I ligand as described in Example 12, Example 13, Example 15, Example 16, or Example 17. The peptide-RIG-I ligand complex is administered to a subject. The subject is a human or an animal and has lymphoma. Administration is intravenous, subcutaneous, intranasal, oral, intraperitoneal, intramuscular, intradermal, or by intratumoral injection. Upon administration, the peptide-RIG-I ligand complex is targeted to cancerous tissues and cells thereof. The complex is internalized by cancer cells and results in immunogenic cell death, followed by an immune response that reduces or eradicates the cancer, as described in Example 38 and exhibits in vivo responses, as described in Example 45.

### Example 73

Treatment of Lymphoma with a Peptide-STING Ligand Complex

[0530] This example describes treatment of lymphoma with any peptide of the present disclosure (e.g., any one of SEQ ID NO: 1-SEQ ID NO: 1134, SEQ ID NO: 1243-SEQ ID NO: 1262, or SEQ ID NO: 1263-SEQ ID NO: 1316) conjugated to an I/O disclosed herein. The I/O is a STING ligand. The peptide is recombinantly expressed or chemically synthesized and is conjugated to the STING ligand as described in Example 12, Example 13, Example 15, Example 16, or Example 17. The peptide-STING ligand complex is administered to a subject. The subject is a human or an animal and has lymphoma. Administration is intravenous, subcutaneous, intranasal, oral, intraperitoneal, intramuscular, intradermal, or by intratumoral injection. Upon administration, the peptide-STING ligand complex is targeted to cancerous tissues and cells thereof. The complex is internalized by cancer cells and results in immunogenic cell death, followed by an immune response that reduces or eradicates the cancer, as described in Example 38 and exhibits in vivo responses, as described in Example 45.

### Example 74

Treatment of Head and Neck Cancer with a Peptide-IL-15 Agent Complex

[0531] This example describes treatment of head and neck cancer with any peptide of the present disclosure (e.g., any one of SEQ ID NO: 1-SEQ ID NO: 1134, SEQ ID NO: 1243-SEQ ID NO: 1262, or SEQ ID NO: 1263-SEQ ID NO: 1316) expressed as a comples with an I/O disclosed herein. The I/O is any IL-15 agent disclosed herein. The peptide is recombinantly expressed as a complex with an IL-15 agent as described in Example 18. The peptide-IL-15 agent complex is administered to a subject. The subject is a human or an animal and has head and neck cancer. Administration is intravenous, subcutaneous, intranasal, oral, intraperitoneal, intramuscular, intradermal, or by intratumoral injection. Upon administration, the peptide-IL-15 agent complex is concentrated in the tumor microenvironment. Optionally, the IL-15 agent is cleaved from the peptide in the tumor microenvironment or in the tumor cells. Optionally, the IL-15 agent is processed and displayed on the surface of the tumor cells. The IL-15 agent acts on cells of the immune system to initiate, prolong, and/or enhance an immune response that reduces or eradicates the cancer, as described in Example 38 and exhibits in vivo responses, as described in Example 45.

### Example 75

Treatment of Head and Neck Cancer with a Peptide-4-1BB Ligand Complex

[0532] This example describes treatment of head and neck cancer with any peptide of the present disclosure (e.g., any one of SEQ ID NO: 1-SEQ ID NO: 1134, SEQ ID NO: 1243-SEQ ID NO: 1262, or SEQ ID NO: 1263-SEQ ID NO: 1316) expressed as a complex with an I/O disclosed herein. The I/O is a 4-1BB ligand. The peptide is recombinantly expressed as a complex, or a fusion protein, with the 4-1BB ligand as described in Example 19. The peptide-4-1BB ligand complex is administered to a subject. The subject is a human or an animal and has head and neck cancer. Administration is intravenous, subcutaneous, intranasal, oral, intraperitoneal, intramuscular, intradermal, or by intratumoral injection. Upon administration, the peptide-4-1BB ligand complex is concentrated in the tumor microenvironment. Optionally, the 4-1BB ligand is cleaved from the peptide in the tumor microenvironment or in the tumor cells. Optionally, the 4-1BB ligand is processed and displayed on the surface of the tumor cells. The 4-1BB ligand acts on cells of the immune system to initiate, prolong, and/or enhance an immune response that reduces or eradicates the cancer, as described in Example 38 and exhibits in vivo responses, as described in Example 45.

### Example 76

Treatment of Lung Cancer with a Peptide-IL-15 Agent Complex

[0533] This example describes treatment of lung cancer with any peptide of the present disclosure (e.g., any one of SEQ ID NO: 1-SEQ ID NO: 1134, SEQ ID NO: 1243-SEQ ID NO: 1262, or SEQ ID NO: 1263-SEQ ID NO: 1316) expressed as a complex or fusion with an I/O disclosed herein. The I/O is any IL-15 agent disclosed herein. The peptide is recombinantly expressed as a complex, or fusion protein, with the IL-15 agent as described in Example 18. The peptide-IL-15 agent complex is administered to a subject. The subject is a human or an animal and has lung cancer. Administration is intravenous, subcutaneous, intranasal, oral, intraperitoneal, intramuscular, intradermal, or by intratumoral injection. Upon administration, the peptide-IL-15 agent complex is concentrated in the tumor microenvironment. Optionally, the IL-15 agent is cleaved from the peptide in the tumor microenvironment or in the tumor cells. Optionally, the IL-15 agent is processed and displayed on the surface of the tumor cells. The IL-15 agent acts on cells of the immune system to initiate, prolong, and/or enhance an immune response that reduces or eradicates the cancer, as described in Example 38 and exhibits in vivo responses, as described in Example 45.

### Example 77

Treatment of Lung Cancer with a Peptide-4-1BB Ligand Complex

[0534] This example describes treatment of lung cancer with any peptide of the present disclosure (e.g., any one of SEQ ID NO: 1-SEQ ID NO: 1134, SEQ ID NO: 1243-SEQ ID NO: 1262, or SEQ ID NO: 1263-SEQ ID NO: 1316) expressed as a fusion with an I/O disclosed herein. The I/O is a 4-1BB ligand. The peptide is recombinantly expressed as a complex, or fusion protein, with the 4-1BB ligand as described in Example 19. The peptide-4-1BB ligand complex is administered to a subject. The subject is a human or an animal and has lung cancer. Administration is intravenous, subcutaneous, intranasal, oral, intraperitoneal, intramuscular, intradermal, or by intratumoral injection. Upon administration, the peptide-4-1BB ligand complex is concentrated in the tumor microenvironment. Optionally, the 4-1BB ligand is cleaved from the peptide in the tumor microenvironment or in the tumor cells. Optionally, the 4-1BB ligand is processed and displayed on the surface of the tumor cells. The 4-1BB ligand acts on cells of the immune system to initiate, prolong, and/or enhance an immune response that reduces or eradicates the cancer, as described in Example 38 and exhibits in vivo responses, as described in Example 45.

### Example 78

Treatment of Renal Cell Carcinoma with a Peptide-IL-15 Agent Complex

[0535] This example describes treatment of renal cell carcinoma with any peptide of the present disclosure (e.g., any one of SEQ ID NO: 1-SEQ ID NO: 1134, SEQ ID NO: 1243-SEQ ID NO: 1262, or SEQ ID NO: 1263-SEQ ID NO: 1316) expressed as a fusion with an I/O disclosed herein. The I/O is any IL-15 agent disclosed herein. The peptide is recombinantly expressed as a complex, or fusion protein, with the IL-15 agent as described in Example 18. The peptide-IL-15 agent complex is administered to a subject. The subject is a human or an animal and has renal cell carcinoma. Administration is intravenous, subcutaneous, intranasal, oral, intraperitoneal, intramuscular, intradermal, or by intratumoral injection. Upon administration, the peptide-IL-15 agent complex is concentrated in the tumor microenvironment. Optionally, the IL-15 agent is cleaved from the peptide in the tumor microenvironment or in the tumor cells. Optionally, the IL-15 agent is processed and displayed on the surface of the tumor cells. The IL-15 agent acts on cells of the immune system to initiate, prolong, and/or enhance an immune response that reduces or eradicates the cancer, as described in Example 38 and exhibits in vivo responses, as described in Example 45.

### Example 79

Treatment of Renal Cell Carcinoma with a Peptide-4-1BB Ligand Complex

[0536] This example describes treatment of renal cell carcinoma with any peptide of the present disclosure (e.g., any one of SEQ ID NO: 1-SEQ ID NO: 1134, SEQ ID NO: 1243-SEQ ID NO: 1262, or SEQ ID NO: 1263-SEQ ID NO: 1316) expressed as a fusion with an I/O disclosed herein. The I/O is a 4-1BB ligand. The peptide is recombinantly expressed as a fusion protein with the 4-1BB ligand as described in Example 19. The peptide-4-1BB ligand complex is administered to a subject. The subject is a human or an animal and has renal cell carcinoma. Administration is intravenous, subcutaneous, intranasal, oral, intraperitoneal, intramuscular, intradermal, or by intratumoral injection. Upon administration, the peptide-4-1BB ligand complex is concentrated in the tumor microenvironment. Optionally, the 4-1BB ligand is cleaved from the peptide in the tumor microenvironment or in the tumor cells. Optionally, the 4-1BB ligand is processed and displayed on the surface of the tumor cells. The 4-1BB ligand acts on cells of the immune system to initiate, prolong, and/or enhance an immune response that reduces or eradicates the cancer, as described in Example 38 and exhibits in vivo responses, as described in Example 45.

### Example 80

Treatment of Lymphoma with a Peptide-IL-15 Agent Complex

[0537] This example describes treatment of lymphoma with any peptide of the present disclosure (e.g., any one of SEQ ID NO: 1-SEQ ID NO: 1134, SEQ ID NO: 1243-SEQ ID NO: 1262, or SEQ ID NO: 1263-SEQ ID NO: 1316) expressed as a complex, or a fusion, with an I/O disclosed herein. The I/O is any IL-15 agent disclosed herein. The peptide is recombinantly expressed as a complex, or a fusion protein, with the IL-15 agent as described in Example 18. The peptide-IL-15 agent complex is administered to a subject. The subject is a human or an animal and has lymphoma. Administration is intravenous, subcutaneous, intranasal, oral, intraperitoneal, intramuscular, intradermal, or by intratumoral injection. Upon administration, the peptide-IL-15 agent complex is concentrated in the tumor microenvironment. Optionally, the IL-15 agent is cleaved from the peptide in the tumor microenvironment or in the tumor cells. Optionally, the IL-15 agent is processed and displayed on the surface of the tumor cells. The IL-15 agent acts on cells of the immune system to initiate, prolong, and/or enhance an immune response that reduces or eradicates the cancer, as described in Example 38 and exhibits in vivo responses, as described in Example 45.

### Example 81

Treatment of Lymphoma with a Peptide-4-1BB Ligand Complex

[0538] This example describes treatment of lymphoma with any peptide of the present disclosure (e.g., any one of SEQ ID NO: 1-SEQ ID NO: 1134, SEQ ID NO: 1243-SEQ ID NO: 1262, or SEQ ID NO: 1263-SEQ ID NO: 1316) expressed as a complex, or a fusion, with an I/O disclosed herein. The I/O is a 4-1BB ligand. The peptide is recombinantly expressed as a complex, or a fusion protein, with the 4-1BB ligand as described in Example 19. The peptide-4-1BB ligand complex is administered to a subject. The subject is a human or an animal and has lymphoma. Administration is intravenous, subcutaneous, intranasal, oral, intraperitoneal, intramuscular, intradermal, or by intratumoral injection. Upon administration, the peptide-4-1BB ligand complex is concentrated in the tumor microenvironment. Optionally, the 4-1BB ligand is cleaved from the peptide in the tumor microenvironment or in the tumor cells. Optionally, the 4-1BB ligand is processed and displayed on the surface of the tumor cells. The 4-1BB ligand acts on cells of the immune system to initiate, prolong, and/or enhance an immune response that reduces or eradicates the cancer, as described in Example 38 and exhibits in vivo responses, as described in Example 45.

### Example 82

### Delivery of RIG-I Ligand to the Cytoplasm of SEAP Reporter Cell Line by Peptide Conjugation

[0539] This example describes delivery of a RIG-I ligand to the cytoplasm of a SEAP reporter cell line by peptide conjugation. A murine B16-Blue IFN-alpha/beta SEAP reporter cell line was used that allows the detection of bioactive murine type I IFNs by monitoring the activation of the JAK/STAT/ISGF3 pathway and/or IRF3 pathway. Stimulation of these cells with a type I IFN inducer (such as RIG-I ligands) intracellularly triggers the production of secreted embryonic alkaline phosphatase (SEAP) by the activation of the IRF-inducible promoter. These cells are derived from the murine B16 melanoma cell line of C57BL/6 origin stably trasnsfected with a SEAP reporter gene under the control of the IFN-α/B-inducible ISG54 promoter enhanced by a multimeric ISRE. Cells were thawed and maintained in RPMI with Heat Inactivated 10% fetal bovine serum, 50 U/ml penicillin, 50 ug/ml streptomycin, 100 ug/ml Normocin™, 2 mM L-glutamine, 100 ug/mL Zeocin. For all assay reads, selective antibiotics were excluded from the complete growth medium. The assay was carried out as follows. B16-Blue reporter cells were plated at 20,000 or 60,000 cells per well in clear 96 well tissue culture plates in 100 uL volume and allowed to attach overnight. The following day, appropriate experiment treatment media was formulated. The RNA-containing test articles, such as double-stranded RNA as well as peptide-I-O complexes, were dissolved in water to form a stock solution. For wells in which transfection was used, Lipofectamine 300 treatments were prepared according to manufacturer's protocol. At time of treatment, appropriate wells were aspirated. Treatment media was then added back to the appropriate corresponding wells at a final volume of 75 or 200 uL. Plates were incubated for the appropriate amount of time (24 hr, 48 hr, or 72 hr). At 24 hr, 48 hr, and 72 hr, cell plate(s) were removed from the incubator and 10 uL was pipetted from experiment and control wells to new white-wall 96 well plate(s) containing 50 uL SEAP assay reagent. This plate was mixed by shaking briefly and allowed to incubate for 15-20 minutes prior to reading on plate reader.

[0540] FIG. 19 shows the luminescence signal from activating the IFN pathway in the SEAP reporter cells. FIG. 19 shows the relative luminescence units (RLU) 24, 48, or 72 hours after treating the cells with 12 pmol or 120 pmol of a peptide-I/O complex of FIG. 37, 5′ppp dsRNA which is SEQ ID NO: 1424 (with triphosphate on the 5′ end) and SEQ ID NO: 1425 (no terminal phosphates) complexed together (the same sequence of 5′ppp RNA as in FIG. 37, double-stranded but without the peptide-linker), or dsRNA which is SEQ ID NO: 1424 and SEQ ID NO: 1425 (no terminal phosphates on either strand) complexed together (the same sequence of RNA as in FIG. 37, double-stranded but without the 5′ppp and without the peptide-linker). No transfection reagent was used in this experiment. It was expected that the presence of a 5′ppp and delivery of the agent to the cytoplasm are both required in order to activate the pathway. This is because a 5′ppp is essential for Rig-I activation and because Rig-I is located into the cytoplasm. It was also expected that 5′ppp dsRNA alone would not reach the cytoplasm at significant levels without addition of a transfection reagent. Very little signal was observed for 5′ppp dsRNA or for dsRNA, whereas significant and increasing signal was seen for a peptide-I/O complex of FIG. 37 at both 12 pmol and 120 pmol doses. This indicated that a peptide-I/O complex of FIG. 37 was able to access the cytoplasm of the cell and activated the RIG-I helicase, without addition of transfection reagent. FIG. 20 shows the fold increase in signal by dosing a peptide-I/O complex of FIG. 37 rather than 5′ppp dsRNA, at matched molar doses of either 12 pmol or 120 pmol. The fold increase by adding the peptide-I/O complex of FIG. 37 ranged from ˜3-30X the signal obtained by dosing just 5′ppp dsRNA without the peptide. FIG. 21 shows the relative luminescence units (RLU) 24 hours after treating the cells with 12 pmol of a peptide-I/O complex of FIG. 37, a peptide-I/O complex of FIG. 34, 5′ppp dsRNA Pos Control described in FIG. 19 (denoted as “5′PPP dsRNA”), or dsRNA Neg Control described in FIG. 19 (denoted as “dsRNA(no5′PPP)”)(the same sequence of RNA double-stranded but without the 5′ppp and without the peptide-linker)). No transfection reagent was used in this experiment. These results demonstrated that a peptide-I/O complex of FIG. 34 and a peptide-I/O complex of FIG. 37 activated the IFN pathway in the cells at higher levels than 5′ppp dsRNA or dsRNA with no transfection reagent present. FIG. 22 shows the RLU signal obtained by dosing various agents in the presence of tranfection reagent. 5′ppp dsRNA with Lipofectamine transfection reagent or dsRNA with Lipofectamine transfection reagent were dosed. Transfection reagents such as Lipofectamine provide a way to deliver a molecule into the cytoplasm in vitro, including those which otherwise would not enter, demonstrating whether something would activate a cytoplasmic target if delivered to the cytoplasm. However, transfection reagents have high toxicity and limited utility in vivo. In FIG. 22, high signaling occured using transfection reagent with the RNA containing the 5′ppp (confirming the activity of 5′ppp dsRNA if delivered to the cytoplasm, such as with a transfection reagent) as well as using transfection reagent with the peptide I/O complexes of FIG. 34 and of FIG. 37 (confirming the activity of these complexes in the cytoplasm) but much lower signaling occured with dsRNA (without the 5′ppp) because of the important role of the 5′ppp in activating the RIG-I pathway. In addition, FIG. 80 illustrates the luminescence signal in relative luminescence units (RLUs) from activating the IFN pathway in SEAP reporter cells 24 hours after treating the cells with the transfection reagent Lipofectamine along with either 16.2 pmole of a peptide-I/O complex of FIG. 34, the peptide-I/O complex of FIG. 36, the I/O of FIG. 35, SEQ ID NO: 1371 with 5′ppp (the same sequence of 5′ppp hpRNA but without the peptide-linker), or SEQ ID NO: 1424 and SEQ ID NO: 1425 dsRNA (the same sequence of RNA double-stranded and without the 5′ppp and without the peptide-linker).

[0541] High signaling is seen using transfection reagent either with the RNA containing the 5′ppp, with the peptide-I/O complex of FIG. 34, with the cleavage product of the peptide-I/O complex of FIG. 34 (which is the structure of FIG. 35), or with the peptide-I/O complex of FIG. 36. The data of FIG. 22 and FIG. 80 shows that if 5′ppp dsRNA, the peptide-I/O complex of FIG. 34, the peptide-I/O complex of FIG. 37, the peptide-I/O complex of FIG. 36, or the cleavage product of the peptide I/o complex of FIG. 34 (which is the structure shown in FIG. 35) are delivered to the cytoplasm, they can activate the Rig-I pathway.

[0542] The combined data also shows the ability of the peptide-I/O complexes such as a peptide-I/O complex of FIG. 37 and a peptide-I/O complex of FIG. 34 to enter the cytoplasm and activate the RIG-I pathway and a type I interferon response.

### Example 83

### In Vitro Demonstration of Cell Death

[0543] This example describes in vitro demonstration of cell death, including apopotosis in cancer cells in vitro, following exposure to a peptide-I/O complex of the present disclosure. The peptide (e.g., any one of SEQ ID NO: 1-SEQ ID NO: 1134, SEQ ID NO: 1243-SEQ ID NO: 1262, or SEQ ID NO: 1263-SEQ ID NO: 1316) is recombinantly expressed or chemically synthesized and then conjugated to a RIG-I ligand or a STING ligand as described in Example 12, EXAMPLE 13, Example 15, Example 16, or Example 17 or as given in FIGS. 34-44. A cancer cell line, such as MCF-7 human breast cancer cell line, is grown in culture. Cells are exposed to the peptide-I/O complex. Upon exposure, the peptide-I/O complex is internalized by the cells and some enters the cytoplasm. The I/O stimulates its target (RIG-I, MDA5 or STING), resulting in stimulation of intracellular signaling pathways that lead to cell death, including apoptosis. Induction of cell death is indicated by staining the cells with a monoclonal antibody (mAb) against Annexin V plus propidium iodide (PI) or another fluorescent DNA stain such as 4′,6-diamidino-2-phenylindole (DAPI).

### Example 84

### In Vitro Demonstration of Immune Response to Cancer Cells

[0544] This example describes in vitro demonstration of immune response to cancer cells by co-culturing cancer cells treated with a peptide-I/O complex of the present disclosure with isolated immune cells. Immune cells are characterized for proliferation and activation of immune effector and/or memory cell subsets. Cancer cells, such as human cancer cell lines or any of the mouse cancer cell lines used in syngeneic tumor models as described in EXAMPLES 36-, 37, 39, 45, 47, are exposed to a peptide-I/O as described in EXAMPLES 16-19, 43, 54.36, 37, 38. The cells are incubated for a period of time sufficient to develop a response to the peptide-I/O complex, for example, 30 minutes, 1 hour, 4 hours, overnight, 24 hours, or 48 hours. The media is removed and cells are washed to remove any remaining peptide-I/O complex. Control cell cultures are maintained in media without the peptide-I/O complex, but are otherwise treated identically. Meanwhile, immune cells are isolated. When the cancer cells are a human cell line, human PBMC are used as the source of immune cells. When the cancer cells are a mouse cell line, immune cells are isolated from spleens of the syngeneic mouse strain. Isolated immune cells are stained with a CFSE dye such as CellTrace (Invitrogen) and then grown in co-culture with the cancer cells. After incubation for a period of time sufficient to develop a response, for example 30 minutes, 1 hour, 4 hours, overnight, 24 hours, 48 hours, or up to a week, the immune cells are removed from the co-culture. The cells are stained with antibodies to lineage markers, such as CD3, CD4, CD8, CD11c, and B220, and the proliferation of the marked subsets is analyzed by flow cytometry. Expression of activation markers, such as CD69, CD80, and CD86, on immune subsets is measured by staining with antibodies specific to the lineage marker(s) and activation marker(s) to be evaluated, followed by flow cytometry analysis. The expression of secreted cytokines in these co-cultures is measured by intracellular staining with antibodies to the cytokines, and/or by assays such as ELISA to measure the amount of each protein secreted into the media.

[0545] Immune cell responses to peptide-I/O complex treated cancer cells that differs from the response to control cell cultures indicate that the cancer cells have gained or increased immunogenic properties on exposure to the peptide-I/O complex. Immune cell responses include proliferation, upregulation of activation markers, and cytokine expression.

[0546] Alternatively, the CFSE-labeled immune cells are cultured with conditioned media harvested from the cancer cell cultures. Assays for lineage-specific proliferation and activation are performed as above. A response indicates that the peptide-I/O complex treated cancer cells secrete soluble factor(s) that stimulate the immune response.

### Example 85

### In Vitro Demonstration of Immune Cell Chemotaxis and Migration

[0547] This example describes co-culture of cancer cells treated with a peptide-I/O complex of the present disclosure with isolated immune cells, in which the immune cells are separated from the cancer cells by a porous membrane or matrix and are characterized for their ability to migrate toward or through the barrier in response to the cancer cells. Cancer cells, such as human cancer cell lines or any of the mouse cancer cell lines used in syngeneic tumor models as described in EXAMPLES 36, 37, and 45, are exposed to a peptide-I/O complex as described in EXAMPLES 36, 37, and 38. The cells are incubated for a period of time sufficient to develop a response to the peptide-I/O complex; for example, 30 minutes, 1 hour, 4 hours, overnight, 24 hours, or 48 hours. The media is removed and cells are washed to remove any remaining peptide-I/O complex. Control cell cultures are maintained in media without the peptide-I/O complex, but are otherwise treated identically. Meanwhile, immune cells are isolated. When the cancer cells are a human cell line, human PBMC are used as the source of immune cells. When the cancer cells are a mouse cell line, immune cells are isolated from spleens of the syngeneic mouse strain. Isolated immune cells are stained with a CFSE dye such as CellTrace (Invitrogen) and then added to a culture chamber adjacent to the cancer cells. After incubation for a period of time sufficient to develop a response, for example 30 minutes, 1 hour, 4 hours, overnight, 24 hours, 48 hours, or up to a week, the chambers are separated and the immune cells are visualized within their original compartment, within the barrier material, and within the cancer cell portion of the chamber. The presence of immune cells within the barrier or the cancer cell chamber in cultures with peptide-I/O complex treated cancer cells to a greater degree than in cultures with control cell cultures indicates that the cancer cells have gained or increased their immune chemotaxis properties on exposure to the peptide-I/O complex.

### Example 86

In Vitro Proliferation of Cells Treated with Peptide-IL-15 Agent Complexes

[0548] This example describes in vitro proliferation of cells treated with peptide-IL-15 agent complexes using cytokine dependent CTLL2 (mouse cytotoxic T lymphocyte cell line), Mo7e (human acute megakaryoblastic leukemia cell line) and human primary CD8+ T cells. All assays were performed in the 96 well plate format in clear bottom black walled tissue culture plates. Peptide-I/O complexes comprising SEQ ID NO: 568, peptide-I/O complexes comprising an IL-15 agent, and peptide-I/O complexes comprising a His-tagged RLI control proteins (SEQ ID NO: 1342) were diluted in culture media without cytokine supplement. Two, five, and ten fold serial dilutions (concentrations varied by experiment and cell type) were performed and analysis of each molecule was performed in triplicate.

[0549] CTLL2 and Mole cells were maintained as cell cultures in media containing either IL-2 (CTLL2) or IL-3 (Mo7e). Viability and cell concentration were analyzed using a Viacell cell counter. After counting, the required number of cells was removed from the suspension culture, washed 2-3 times, and resuspended in media that did not contain cytokine supplement and cytokine starved by placing them in a culture flask and incubating at 37°° C., 5% CO2 for 4 hours. The cells were then added to the wells (20,000 Mo7e or 5,000 CTLL2 cells in 90 ul) containing 10 uL test proteins and incubated for 2 (CTLL2) or 3 (Mo7e) days (final volume was 100 uL per well). Additional wells that contained growth media without cells were included as a blank for the assay.

[0550] CD8+ selected primary human T-cells were received as frozen cells and stored in the LN2 vapor phase until used. Cells were thawed in a 37° C. water bath then slowly added to 5 mL of room temperature 50% FBS/50% RPMI media. 15 mL of room temperature 10% FBS RPMI media was added to the cell suspension; the cells were then pelleted, resuspended in 10% FBS media, and counted using the Viacell. One half of the cells were then appropriately diluted using 10% FBS RPMI media and 40,000 cells/well (in 90 uL) were added to the 96 well plate containing test proteins. Final volume was 100 uL. The second portion of cells were resuspended in media containing 5 ug/mL PHA then incubated at 37°° C. for 3 days to generate blasts. The cells were then washed, resuspended in media containing 10 units/mL IL-2, and incubated at 37°° C. for 1 day prior to plating as described above.

[0551] After the end of the incubation period, PrestoBlue live cell assay reagent (Invitrogen) was added to each well (10 uL per 100 uL well). Plates were then returned to the incubator for 4-6 hours (CTLL2 and Mo7e) or 24 hours (CD8+ cells). Fluorescence was quantified using an Envision (Perkin Elmer 2104) plate reader. Data was graphed and analyzed in Excel, GraphPad Prism 7, or the AAT Bioquest graphing and EC50 calculator https://www.aatbio.com/tools/ec50-calculator.

[0552] Peptide-I/O complexes comprising SEQ ID NO: 568 retain cytokine activity and stimulate proliferation in the CTLL2, Mole, and CD8+primary human T cells. FIG. 28 illustrates proliferation curves for CTLL2 cells. FIG. 28A illustrates proliferation curves for CTLL2 cells after exposure to increasing concentrations of SEQ ID NO: 1317, SEQ ID NO: 1318, SEQ ID NO: 1319, and SEQ ID NO: 1321 and His-tagged RLI protein (SEQ ID NO: 1342). FIG. 28B illustrates the CTLL2 proliferation curve for SEQ ID NO: 1320, an IL-15 (SEQ ID NO: 1177), and a His-tagged RLI (SEQ ID NO: 1342). Each data point represents an average of n=3. RFU-relative fluorescence units.

[0553] FIG. 29 illustrates proliferation curves for Mole cells after exposure to increasing concentration of SEQ ID NO: 1317, SEQ ID NO: 1318, SEQ ID NO: 1319, SEQ ID NO: 1320, and SEQ ID NO: 1321 and a His-tagged RLI (SEQ ID NO: 1342). Each curve shows an n=3 per group and error bars represent standard error of the mean (SEM). The results demonstrate that these IL-15 agents stimulate Mo7e cells. FIG. 30 illustrates proliferation curves for CD8+primary human T cells and PHA induced T cell blasts from the same CD8+ T cell donor. FIG. 30A illustrates proliferation curves for CD8+primary human T cells after exposure of increasing concentration of SEQ ID NO: 1317, SEQ ID NO: 1318, SEQ ID NO: 1319, SEQ ID NO: 1320, and SEQ ID NO: 1321 and a His-tagged RLI (SEQ ID NO: 1342). Each point on the curve shows an average of n=3 per group. RFU-Relative Fluorescence units. FIG. 30B illustrates proliferation curves for PHA induced T cell blasts from the same CD8+ T cell donor as FIG. 30A after exposure of increasing concentration of SEQ ID NO: 1317, SEQ ID NO: 1318, SEQ ID NO: 1319, SEQ ID NO: 1320, and SEQ ID NO: 1321 and a His-tagged RLI (SEQ ID NO: 1342). Each point on the curve shows an average of n=3 per group. RFU-Relative Fluorescence units. These data demonstrate that these IL-15 agents stimulate human CD8+ T cells.

[0554] In Vitro Proliferation of Cells Treated with SEQ ID NO: 569-IL-15 Agent Complexes. Unpurified supernant from HEK293 cells transfected with an expression plasmid containing SEQ ID NO: 1328 (and thus expected to secrete the protein of SEQ ID NO: 1328 into the supernatant) were tested for cytokine activity using the Mo7e proliferation assay. Mo7e cells are a cytokine dependent human megakaryoblastic leukemia cell line and are maintained in culture media containing IL-3 but will also proliferate in response to IL-15 stimulation. Viability and cell concentration was analyzed using a Viacell cell counter. After counting, the required number of cells were removed from the suspension culture, washed 3 times with culture media to remove any residual IL-3, and resuspended in media that did not contain the cytokine supplement. Mo7e cells were cytokine starved by placing them in a culture flask and incubating at 37° C., 5% CO2 for 4 hours. Cells were then added to the wells containing unpurified SEQ ID NO 1328-containing supernatant, HEK293 conditioned media that was not transfected with an expression vector (“mock”, SEQ ID NO: 1328 expression), or media only (“no treatment”) at a final 110 fold dilution and incubated for 3 days. Additional wells that contained growth media without cells were included as a blank for the assay.

[0555] After the end of the incubation period, PrestoBlue live cell assay reagent (Invitrogen) was added to each well per manufacture instructions. Plates were then returned to the incubator for 4 hours. PrestoBlue fluorescence was quantified using an Envision (Perkin Elmer 2104) plate reader.

[0556] Peptide-I/O complex comprising SEQ ID NO: 1328 exhibit cytokine activity and stimulate proliferation in Mo7e cells. FIG. 83 illustrates the fluorescent signal in relative fluorescence units (RLUs) from the PrestoBlue live cell assay 3 days after treating Mo7e cells with conditioned media (supernatant) from HEK293 cells transfected with a SEQ ID NO: 1328 expression vector or HEK293 condition media from non-transfected cells (mock negative control). Untreated Mo7e cells are also included as an additional negative control. Error bars represent Standard Deviation (n=3 per group). This demonstrates that the peptide-I/O complex comprising seq id no: 1328 stimulates the Mole cells.

[0557] Any peptide of the present disclosure can comprise a peptide-IL-15 agent complex with similar results, including any peptide of SEQ ID NO: 1, SEQ ID NO: 2, SEQ ID NO: 568, SEQ ID NO: 569 or SEQ ID NO: 570, or any peptide that is 80%, 85%, 90%, 95%, 96%, 97%, 98%, 99% or more identical to any of the foregoing.

### Example 87

### Tumor Cell Responses to Peptide-I/O Complexes

[0558] This example describes tumor cell responses, including interferon production, induction of an anti-tumor gene expression profile including interferon stimulated genes, and apoptosis, with peptide-I/O complexes. A peptide-I/O complex of this disclosure was tested for its ability to cause apoptosis and induce an interferon response in a tumor in vivo using CT26 colon carcinoma cells and A20 lymphoma cells. A peptide-I/O complex of FIG. 37 was assessed in Female Balbc mice.

[0559] To create flank tumors, mice were inoculated with 0.2 million CT26 cells in a 100 uL volume. Test articles were injected directly into the tumors with a proprietary microinjector device, allowing local separate injection of 4 separate test groups into the same tumor at different locations, as described in Klinghoffer, R. A. et al. A technology platform to assess multiple cancer agents simultaneously within a patient's tumor. SciTranslMed 7, 284ra258, doi:10.1126/scitranslmed.aaa7489 (2015) and Moreno-Gonzalez, A., Olson, J. M. & Klinghoffer, R. A. Predicting responses to chemotherapy in the context that matters-the patient. MolCell Oncol 3, e1057315, doi: 10.1080/23723556.2015.1057315 (2016). Each test article was admixed with a fluorescent tracking marker (FTM) prior to injection to allow identification of the location of each injection within a tumor. Mice were enrolled in microinjection studies when the implanted tumors reached the following approximate dimensions: 9 mm (length), 8 mm (width) and 3 mm (depth). The microinjection device was configured with 4 injection needles with a total volume delivery of 1.2 uL per needle per tumor injection. A fluorescent tracking marker (FTM) was added to injection contents for spatial orientation. Total amounts of agents injected per site were a: 1 ug (60 pmol) of a peptide-I/O complex of FIG. 37, b: 50 uM of chloroquine diphosphate salt, c: 1 ug of a peptide-I/O complex of FIG. 37 plus 50 uM of chloroquine, or d: 0.6 ug (48 μmol) of 5′ppp-dsRNA (Invivogen) formulated in in vivo-jetPEI (Polyplus/VWR) as per manufacturer's instructions (including 12.5 uL of the 5′ppp dsRNA stock, 4 uL of in vivo-jetPEI reagent, 25 uL of 10% glucose, 2.5 uL of FTM, and 6 uL of water, resulting in final glucose concentration 5% and an N/P ratio of 8) where the 5′ppp-dsRNA is double stranded RNA with a 5′ppp on the sense strand and of SEQ ID NO: 1424 and SEQ ID NO: 1425. Tumors were resected for analyses at 4 and 24 hours post microinjection. Resected tumors were fixed, processed, stained and scanned as described in Klinghoffer ref. Rabbit anti-CC3 antibody (Cell Signaling #9661, 1:150 dilution) was used for immunohistochemical (IHC) assays. For immunofluorescent detection, secondary antibody conjugated to AlexaFluor647 (#111-605-144 Jackson Immuno research, 1:600 dilution) was applied as per manufacturer's instructions and tissues were counterstained with DAPI. H&E staining was carried out for general histological assessment.

[0560] Results of the experiment are shown in FIG. 16-FIG. 18 and FIG. 86. Images were captured using Panoramic Viewer; brightness and contrast were adjusted using Adobe Photoshop software. Image panels (as required for high magnification figures) were generated using Adobe Illustrator and then adjusted as above when required. Colocalization of the FTM from a test article treatment group along with localized cleaved caspase 3 (CC3) staining indicates apoptosis caused by the test article injection, which can indicate activation of the RIG-I pathway by delivery of the oligonucleotide to the RIG-I helicase located in the cytoplasm of the CT26 cancer cells. FIG. 16 illustrates a CT26 tumor sample that was microinjected with a peptide-I/O complex of FIG. 37, a peptide-I/O complex of FIG. 37+chloroquine, chloroquine (CQ), or 5′ppp dsRNA+PEI and harvested and stained 4 hours post-treatment. The upper image shows the entire tumor sample and bottom images are zoomed in to specific regions of treatment as labeled. The dotted arrows indicate some of the locations of the injections (traced via the FTM) and the white punctate spots indicate CC3 staining. A large region showed CC3 staining for the site injected with the peptide-I/O complex of FIG. 37+chloroquine, whereas the sites injected with a peptide-I/O complex of FIG. 37 alone, chloroquine alone, or 5′ppp dsRNA+PEI did not have a significant region of CC3 staining. Bottom images show further zoomed in views of staining. In FIG. 16, CC3 apoptosis marker is colocalized with the peptide-I/O complex of FIG. 37+chloroquine test article, indicating apoptosis induction at 4 hours by this peptide-I/O complex of FIG. 37+chloroquine. There is not clear evidence of significant costaining of CC3 with the other test articles in this sample. FIG. 17 illustrates a CT26 tumor sample from a different animal that was microinjected with a peptide-I/O complex of FIG. 37, a peptide-I/O complex of FIG. 37+chloroquine, chloroquine, or 5′ppp dsRNA+PEI and harvested and stained 24 hours after treatment. The upper image shows the entire tumor sample and bottom images are zoomed in to specific regions of treatment as labeled. The dotted arrows indicate some of the locations of the injections and the white punctate spots indicate some of the CC3 staining. A large region showed CC3 staining for the site injected with the peptide-I/O complex of FIG. 37 and for the site injected with the peptide-I/O complex of FIG. 37+chloroquine and these are zoomed in in the bottom images, whereas the site injected 5′ppp dsRNA+PEI did not have a significant region of CC3 staining. Both a peptide-I/O complex of FIG. 37 and a peptide-I/O complex of FIG. 37+chloroquine show strong colocalized staining with CC3, indicating apoptosis induction at 24 hours by both a peptide-I/O complex of FIG. 37 and a peptide-I/O complex of FIG. 37+chloroquine. There is not co-staining with CC3 evident with the 5′ppp dsRNA+PEI) injection (the chloroquine site is not present in this tumor sample). FIG. 18 illustrates a CT26 tumor sample from a different animal that was microinjected with a peptide-I/O complex of FIG. 37, a peptide-I/O complex of FIG. 37+chloroquine, chloroquine, or 5′ppp dsRNA+PEI and harvested and stained 24 hours after treatment. The arrows or circled regions indicate some of the locations of the injections and the white punctate spots indicate some of the CC3 staining. A large region showed CC3 staining for the site injected with the peptide-I/O complex of FIG. 37 and for the site injected with 5′ppp dsRNA+PEI. The CQ and the peptide-IO complex of FIG. 37+chloroquine injection sites are uninterpretable due to merging with a general area of tumor necrosis in this sample. Both a peptide-I/O complex of FIGS. 37 and 5′ppp dsRNA+PEI show strong colocalized staining with CC3, indicating apoptosis induction at 24 hours by both a peptide-I/O complex of FIGS. 37 and 5′ppp dsRNA+PEI. TSignals varied in different animals tested. One animal showed CC3 staining at 24 h at a site injected solely by chloroquine. This data indicates the ability of a peptide-I/O complex of FIG. 37 to induce localized apoptosis upon injection into a tumor (and without any PEI or transfection reagent). The addition of chloroquine co-injected with a peptide-I/O complex of FIG. 37 might accelerate the apoptotic response. In order to induce an apoptotic response via the Rig-I pathway, the peptide-I/O complex of FIG. 37 would need to be delivered to the Rig-I helicase located in the cytosol of cells in the tumor. This indicates tha the peptide-I/O complex of FIG. 37 may be able to deliver the 5′ppp hairpin RNA to the cytosol. 5′ppp dsRNA+PEI also showed apoptotic response in a tumor as shown in FIG. 18, where the cytosolic delivery of the 5′ppp dsRNA may have been achieved to do the transfection reagent PEI causing cytosolic delivery of the dsRNA.

[0561] In another experiment, BalbC mice were similarly inoculated with A20 lymphoma cells to form a tumor and were enrolled when the implanted tumors reached the following approximate dimensions: 14 mm (length), 10 mm (width) and 7 mm (depth). They were dosed with multiple test articles via microinjection with a device that can inject at 6 locations simultaneously (here, 1.2 μL per injection site), euthanized at 4 and 24 hours, and tumors stained for various markers similarly. Total amounts of agents injected per site were 1 or 2 μg (60 or 120 pmol) of a peptide-I/O complex of FIG. 37, 0.74 μg (60 pmol) of 5′ppp-hpRNA (SEQ ID NO: 1371), 0.6 μg (48 μmol) of 5′ppp-dsRNA formulated in in vivo jet PEI as per manufacturer's instructions, 1 μg (3542 μmol) of DMXAA (FIG. 26D), or PBS. 5′ppp-dsRNA in in vivo jet PEI formulation included 5 μL of a 5′ppp dsRNA stock, 4 μL of in vivo-jetPEI reagent, 25 μL of 10% glucose, 2.5 μL of FTM, and 13.5 μL of water, resulting in final glucose concentration 5% and an N/P ratio of 8). The 5′ppp-dsRNA is double stranded RNA with a 5′ppp on the sense strand of SEQ ID NO: 1424 complexed with SEQ ID NO: 1425.

[0562] FIG. 81 illustrates an A20 lymphoma sample that was microinjected with a peptide-I/O comples of FIG. 37, PBS, DMXAA, 5′ppp dsRNA+in vivo jet PEI, and 5′ppp hpRNA. The white punctate spots indicate CC3 staining. Images were taken 24 hours after administration. FIG. 81A illustrates a zoomed out image of the A20 lymphoma sample that has been microinjected with a peptide-I/O comples of FIG. 37 at lug and 2 μg, PBS, DMXAA, 5′ppp dsRNA+in vivo jet PEI, and 5′ppp hpRNA; the regions of injection are labeled with text. FIG. 81B illustrates zoomed in images of the PBS region, the 5′ppp hpRNA region, the region in which a peptide-I/O complex of FIG. 37 at the 2 μg dose was injected, and the region in which a peptide-I/O complex of FIG. 37 at the 1 μg dose was injected. CC3 staining is shown by white punctate spots. The peptide-I/O complex of FIG. 37 at both 1 μg and 2 μg doses show strong colocalized staining with CC3, indicating the induction of apoptosis by injection of this test article. The other injected sites on this sample do not show similarly strong induction of apoptosis.

[0563] Quantitative analysis of drug responses was performed as previously described (Klinghoffer, R. A. et al. Sci Transl Med (2015); Dey, J. et al PLOS One (2016)). Injection sites were automatically identified with the help of the FTM, then within circular regions of interest centered on the injection site, cells are automatically identified and assigned to different classes based on their staining patterns. The fraction of cells belong to each class (e.g., CC3 positive) are mapped as a function of radial distance. For comparison of responses induced by two agents, the radial effect curves for each agent alone and a vehicle control are used in conjunction with a linear mixed effects model to estimate whether the response from one agent is significantly greater than the other.

[0564] FIG. 82 is a radial plot analysis of what fraction of cells are positive for CC3 staining as the distance from an injection site is increased (a fraction of 0.3 indicates 30% of cells are positive) for a total of 7-8 tumors for each test article, at the 4 hour and 24 hour timepoint. At the 24 hour timepoint, the peptide-I/O complex of FIG. 37 at both 1 μg and 2 μg doses shows increased fraction of CC3 positive cells closer to the site of injection of the test article, whereas PBS or 5′ppp hpRNA show very little increase in CC3 positive cells close to the injection site. The addition of the transfection reagent PEI combined with 5′ppp dsRNA also results in some increase in CC3 positive cells. The increase in fraction of cells that are CC3 positive near the injection site of test article is significantly higher where 60 pmol (1 μg) of peptide-I/O complex of FIG. 37 is injected than near where an equimolar amount of 5′ppp hpRNA is injected (P<0.05 indictated by * on the graph). Because peptide-I/O complex of FIG. 37 comprises the same 5′ppp hpRNA sequence but also has the peptide of this disclosure added, this indicates that the combination of the peptide of this disclosure with the Rig-I I/O agent 5′ppp hpRNA increases its ability to cause apoptosis in the cells, which could be due to cytosolic delivery of the 5′ppp hpRNA to the Rig-I helicase.

[0565] In addition, tumor samples from both experiments were also stained for induction of IFNb response. Interferon beta (IFNb) response was detected using in situ hybridization using the RNAscope multiplex fluorescent reagent kit v2 (Advanced Cell Diagnostics) following the manufacturer's instructions. The RNAscope ISH assay is completed with a mouse IFNb1 probe and TSA Plus Cyanine 5 detection. The slides are counterstained with DAPI and imaged.

[0566] FIG. 86 illustrates a CT26 tumor sample that was microinjected with a peptide-I/O complex of FIG. 37, a peptide-I/O complex of FIG. 37+chloroquine, chloroquine (CQ), or 5′ppp dsRNA+PEI and harvested and stained 4 hours post-treatment. The upper image shows the entire tumor sample and bottom images are zoomed in to specific regions of treatment as labeled. The dotted arrows indicate some of the locations of the injections (traced via the FTM) and the white punctate spots indicate IFNb mRNA staining. The site of chloroquine injection is not present in this sample. Significant staining for IFNb mRNA is seen in the regions that were injected with the peptide-I/O complex of FIG. 37 and for the region injected with 5′ppp dsRNA+PEI, as seen in the top image and zoomed in in the bottom images. This indicates the ability of the peptide-I/O complex of FIG. 37 to generate an IFNb response, without use of transfection reagent, which can indicate delivery of the I/O RNA to the cytosol and Rig-I pathway engagement.

[0567] FIG. 84 and FIG. 85 illustrates an A20 lymphoma sample from the above experiment that was microinjected with a peptide-I/O comples of FIG. 37, PBS, DMXAA, 5′ppp dsRNA+in vivo jet PEI, and 5′ppp hpRNA. The white punctate spots indicate IFNb mRNA staining. Images were taken 4 hours after administration. FIG. 84 illustrates a zoomed out image of the A20 lymphoma sample that has been microinjected with a peptide-I/O complex of FIG. 37 at lug and 2 μg, PBS, DMXAA, 5′ppp dsRNA+in vivo jet PEI, and 5′ppp hpRNA; the regions of injection are labeled with text. FIG. 85 illustrates zoomed in images of the PBS region, the 5′ppp hpRNA region, the region in which a peptide-I/O complex of FIG. 37 at the 2 μg dose was injected, and the region in which a peptide-I/O complex of FIG. 37 at the 1 μg dose was injected. IFNb mRNA staining is shown by white punctate spots. The regions injected with 1 μg or 2 μg of the peptide-I/o complex of FIG. 37 show signficaint IFNb mRNA staining. The region injected with 5′ppp hpRNA also shows sigifniciatn IFNb mRNA staining, whereas the region injected with PBS does not. This indicates the ability of the peptide-I/O complex of FIG. 37 to generate an IFNb response, without use of transfection reagent, which can indicate delivery of the I/O RNA to the cytosol and Rig-I pathway engagement.

[0568] Taken together, the results of these experiments demonstrate the ability of the peptide-I/O complex of FIG. 37 to induce IFNb mRNA and to induce apoptosis when delivered in vivo to A20 and CT26 tumors, without use of any transfection reagent. This can indicate the ability of the peptide-I/O complex of FIG. 37 to deliver the RNA I/O to the cytosol of the cells and induce the Rig-I pathway.

### Example 88

Treatment of Head and Neck Cancer with a Peptide-I/O Complex

[0569] This example illustrates treatment of head and neck cancer using peptide-I/O complexes of the present disclosure. A peptide of the present disclosure is recombinantly expressed or chemically synthesized and are used directly, after conjugation to an I/O. The peptide-I/O complex is administered in a pharmaceutical composition to a subject as a therapeutic for head and neck cancer. One or more peptide-I/O complexes of the present disclosure are administered to a subject. A subject can be a human or an animal. The pharmaceutical composition is administered subcutaneously, intravenously, orally, or injected directly into a tumor. The administered peptide-I/O complexes target head and neck cancer-affected tissues and cells thereof.

[0570] The peptide is any peptide with the sequence selected from SEQ ID NO: 1-SEQ ID NO: 1134, SEQ ID NO: 1243-SEQ ID NO: 1262, or SEQ ID NO: 1263-SEQ ID NO: 1316. Such peptide-drug conjugates can be made using either a cleavable or stable linker as described herein (e.g., EXAMPLES 8 and 9).

### Example 89

Enzymatic processing of Peptide-IL-15 Agent Complex

[0571] This example describes enzymatic processing of a peptide-IL-15 agent complex of the present disclosure. Peptide-IL-15 agent complexes that are exposed to tumor cells or the tumor microenvironment are processed by enzymes that are present at higher concentration in the tumor environment or in subcellular compartments to which they are delivered, such as by endocytosis into endosomes. This example describes the change in potency of the IL-15 agent in peptide-IL-15 agent complexes after exposure to the enzyme cathepsin B. Cathepsin B can display exopeptidase activity at pH 5 and endopeptidase activity at pH 7. SEQ ID NO: 1317, SEQ ID NO: 1318, SEQ ID NO: 1319, SEQ ID NO: 1320 and SEQ ID NO: 1321 and a His-tagged RLI (SEQ ID NO:1342) were tested for their IL-15 cytokine activity with and without exposure to cathepsin B at pH 7 and pH 5. The pH conditions were selected to mimic the neutral pH of early endosomes that determine endopeptidase activity and more acidic pH 5 dependent exopeptidase activities of later endosomes and lysosomes.

[0572] Cathepsin B cleavage was conducted at pH 7 and pH 5. Reaction buffer for the pH 7 condition was PBS+8 mM Cysteine and the reaction buffer for the pH 5 condition was 50 mM sodium acetate+8 mM Cysteine. Fusion proteins were diluted to 2 uM in reaction buffer in a microfuge tube. Cathepsin B (0.44 μg) was added to each reaction and placed in the tissue culture incubator set at 37° C. with 5% CO2 for 2 hours. The control condition did not contain cathepsin B enzyme but was otherwise identical. After the reaction period, 1 M HEPES (1% of the reaction volume) was added to the pH 5 condition in order to neutralize the acidic buffer. Serial dilutions of each reaction was performed using the reaction buffer (1% HEPES was added to the diluent for the pH 5 condition) and then added to the wells of a 96 well plate in triplicate (10 μL per well).

[0573] All assays were performed in a 96 well plate format in clear bottom black walled tissue culture plates. CTLL2 cells (mouse cytotoxic T lymphocyte cell line) were maintained as cell cultures in media supplemented with IL-2. Mo7e (human acute megakaryoblastic leukemia cell line) were maintained in media supplemented with IL-3. Viability and cell concentration was analyzed using a Viacell cell counter. After counting, the required number of cells were removed from the suspension culture, washed 3 times, and resuspended in media that did not contain cytokine supplement. Culture media for the pH 5 condition contained HEPES. CTLL2 and Mo7e cells were cytokine starved for 4 hours in the 37° C. tissue culture incubator and then added to the wells containing the peptide-IL-15 agent complexes (5,000 CTLL2 or 20,000 Mo7e cells per well in 90 μL) with a final volume of 100 μL. The plates were returned to the incubator for 2 (CTLL2) or 3 (Mo7e) days. Additional wells that contained growth media without cells were included as a blank for the assay. After the end of the incubation period, PrestoBlue viable cell assay reagent (Invitrogen) was added to each well (10 μL per 100 μL well). Plates were then returned to the incubator for 4-24 hours. Fluorescence was quantified using an Envision (Perkin Elmer 2104) plate reader.

[0574] Cytokine activity was increased in some fusion proteins tested after exposure to cathepsin B at either pH 7 or pH 5. FIG. 31 illustrates cytokine activity, with (+) and without (−) cathepsin B treatment at pH 5, for a His-tagged RLI (SEQ ID NO: 1342) and a peptide-IL-15 agent complex of SEQ ID NO: 1318 in Mo7e cells at various concentrations (nM) of the peptide-IL-15 agent complex or RLI as noted. Each point on the curve shows an average of n=3 per group. Each point on the curve shows an average of n=3 per group. FIG. 31 shows the proliferation curve for SEQ ID NO: 1318 with and without cathepsin B cleavage at pH 5 in Mole cells. Without cathepsin B cleavage the potency of SEQ ID NO: 1318 is significantly lower than a His-tagged RLI (SEQ ID NO: 1342). After cathepsin B cleavage, potency increases to levels similar to RLI restoring RLI-like activity in this Peptide-IL-15 complex. FIG. 32 illustrates Cathepsin B cleavage in a CTLL2 proliferation assay.

[0575] FIG. 32A illustrates cytokine activity, after cathepsin B treatment at pH 7, of SEQ ID NO: 1319 in CTLL2 cells. Each point on the curve shows an average of n=3 per group. FIG. 32B illustrates cytokine activity, after cathepsin B treatment at pH 7, of SEQ ID NO: 1321 in CTLL2 cells. Each point on the curve shows an average of n=3 per group. FIG. 32 demonstrates that cytokine activity is increased after cathepsin B cleavage at pH 7 in CTLL2 cells SEQ ID NO: 1319. FIG. 33 illustrates cytokine activity, after cathepsin B treatment at pH 5, of SEQ ID NO: 1317 in CTLL2 cells. Each point on the curve shows an average of n=3 per group. FIG. 33 demonstrates that cytokine activity is increased after cathepsin B cleavage at pH 5 (exopeptidase conditions) in CTLL2 cells for SEQ ID NO: 1317. Any peptide of the present disclosure can comprise a peptide-IL-15 agent complex with similar results, including any peptide of SEQ ID NO: 1, SEQ ID NO: 2, SEQ ID NO: 568, SEQ ID NO: 569 or SEQ ID NO: 570, or any peptide that is 80%, 85%, 90%, 95%, 96%, 97%, 98%, 99% or more identical to any of the foregoing

### Example 90

### In Vitro Characterization of Tumor Cell Responses to Peptide-I/O Complexes

[0576] This example describes in vitro characterization of tumor cell responses to peptide-I/O complexes of the present disclosure. Cancer cells, such as human cancer cell lines or any of the mouse cancer cell lines used in syngeneic tumor models as described in EXAMPLES 36, 37, 45, are exposed to a peptide-I/O complex as described in EXAMPLES 36, 37, 38. The cells are incubated for a period of time sufficient to develop a response to the peptide-I/O complex; for example, 30 minutes, 1 hour, 4 hours, overnight, 24 hours, or 48 hours. A variety of responses are measured. The ability of cells to migrate is measured by scraping cells from an area of the culture dish, then measuring the change in width of the cleared area over time. Secreted proteins such as cytokines and growth factors are measured by standard methods such as ELISA. Changes in patterns of expression are measured at the protein level (proteomics analysis) or at the RNA level by microarray or RNA sequencing.

### Example 91

In Vitro Characterization of Tumor Cell Interactions with Stroma and Endothelium

[0577] This example describes in vitro characterization of tumor cell interactions with stroma and endothelium. Specifically, this example describes co-culture of cancer cells treated with a peptide-I/O complex of the present disclosure with stromal and/or vascular endothelial cells, in which the tumor cells are characterized for their ability to provoke inflammation or otherwise enhance the pro-tumor environment, to invade stroma, and/or to extravasate through vascular endothelium. Cancer cells, such as human cancer cell lines or any of the mouse cancer cell lines used in syngeneic tumor models as described in EXAMPLES 36, 37, 45, are exposed to a peptide-I/O complex as described in EXAMPLES 36, 37, 38. The cells are incubated for a period of time sufficient to develop a response to the peptide-I/O complex; for example, 30 minutes, 1 hour, 4 hours, overnight, 24 hours, or 48 hours. The media is removed and cells are washed to remove any remaining peptide-I/O complex. Control cell cultures are maintained in media without the peptide-I/O complex, but are otherwise treated identically. For some experiments, the peptide-I/O complex is added directly to the co-cultures. For some experiments, the cancer cells may be labeled with CFSE or other fluorescent marker. Stromal cells, such as fibroblasts, are plated directly or suspended in a gel such as Matrigel. Vascular endothelial cells are plated directly or grown in plates such as Transwell plates where two cultures are separated by a porous membrane. Cancer cells are cultured directly with the stromal cells or vascular endothelial cells, or are cultured in a Transwell type plate either in the same chamber or in the chamber opposite the stromal or vascular endothelial cells. After incubation for a period of time sufficient to develop a response, for example 30 minutes, 1 hour, 4 hours, overnight, 24 hours, 48 hours, or up to a week, the cultures are analyzed. Secreted growth factors and cytokines are measured by standard methods such as ELISA. The number and location of cancer cells is determined by counting the fluorescence labeled cells that have infiltrated the Matrigel or have migrated to or through the vascular endothelial cell layer. Reduction in stromal or matrix invasion, reduction in migration to or through vascular endothelium, and/or reduction in growth factors and cytokines that promote tumor cell growth and/or inhibit apoptosis in cultures with peptide-I/O complex treated cancer cells compared to control cell cultures indicates that the cancer cells have reduced invasion or metastasis properties on exposure to the peptide-I/O complex.

### Example 92

### Activation of RIG-I, MDA5, TLR3, or STING Pathways In Vitro

[0578] This example describes activation of RIG-I, MDA5, TLR3, or STING pathways in vitro. A peptide of this disclosure is complexed with an agent that can activate the RIG-I, the MDA5, the TLR3, or the STING pathway. Complexation can be by conjugating the peptide to the agent such as using the methods of Example 16 or 17. Peptide-I/O conjugates such as the agents in FIGS. 13, 34, 37 are optionally used. A peptide of this disclosure is conjugated to ligands that stimulate related targets in the cell that will also trigger the SEAP reporter via IRF3 signaling as described in Example 82. In particular, a peptide of the present disclosure is conjugated with a RIG-I ligand with 5′ diphosphate, at least 10 base pairs, blunt 5′ end, a greater than 12 base pair dsRNA (no 5′phosphates) to trigger MDA5, such as poly(I:C) or long poly (I:C)>50 bp dsRNA to trigger TLR3, Cyclic dinucleotide ligand for STING, or CPG for TLR9.

[0579] The peptide-I/O complex is applied to cells shown to trigger the SEAP report via IRF3 as described in Example 82.

### Example 93

### Effect of Peptide-IL-15 Agent Complexes on Immune Cell Populations

[0580] This example describes the effect of peptide-IL-15 agent complexes on immune cell populations. A peptide-I/O agent complex that comprises an IL-15 agent as the I/O can activate immune cells in different ways depending on factors such as inclusion of portions of the IL-15Rα chain in the peptide-I/O agent complex. Differences in the expression and composition of the IL-15R, and in particular the IL-15Rα chain occur among immune cells. Naive T cells express little or no IL-15Rα, while memory and effector T cells express high levels. IL-15 promotes CD4 T cell expansion, but significantly less than the expansion of NK cells and CD8 T cells, especially CD8 effector memory cells (Conlon 2015, Romee 2018). The expression of IL-15Rα, along with the IL-2RBy chains, endows cells with a much higher sensitivity to IL-15 (Dubois 2002). The prediction is that, due to the differential expression of IL-15Rα, naked IL-15 will stimulate mature T cells (IL-15Rα″) more effectively than naive cells (IL-15Rα″), but that an fusion IL-15 agent that contains IL-15 and IL-15Rα (such as sushi+) will stimulate both equally. This is a valuable property of a hyperagonist that can enhance anti-tumor immunity. The absence of Treg expansion is also a valuable criteria.

[0581] The potency of IL-15 and of peptide-IL-15-IL-15Rα (IL-15 fusion) complexes, such as described in Example 18, on human leukocyte subsets is tested in vitro on normal human PBMC. Cells are with CFSE, as described in Kermer et al. (Mol Cancer Ther. 2012 June; 11(6): 1279-1288), and cultured with various concentrations of IL-15 or the Peptide-IL-15-IL-15Rα complexes. After 5 days, the cells are harvested and analyzed by flow cytometry for their CFSE content and expression of T cell and NK cell surface markers. Markers may include CD3, CD4, CD8, CD56, CD16, Ki67, CD45 (RA and RO), NKG2D, CD127, CCR7, CC27, CD95, NKp30, TIM-3, and CD107a. The peptide-IL-15-IL-15Rα (IL-15 fusion) complexes stimulate particular subsets of these cells, especially CD4, CD8, yST, Tregs, and NK cells, at lower concentrations than naked IL-15. CD4 T cells are expected to expand less than the CD8 or NK cells, based on the published clinical trial results (Conlon 2015, Romee 2018).

### Example 94

Determining Trafficking and Compartment in which Peptide-I/O Complexes Enter a Cell

[0582] This example describes determining trafficking and the compartment in which peptide-I/O complexes disclosed herein enter a cell. The compartment where a peptide-I/O complex that is a peptide-RIG-I ligand complex enters the cytoplasm is studied with pharmacological inhibitors of endosomal maturation and acidification. Pharmacological inhibitors of endosomal maturation and acidification include Bafilomycin, which is an inhibitor of endosomal acidification (blocking of the SEAP reporter by this agent will indicate that endosome acidification is critical), Wortmannin, which prevents maturation of EE to late endosomes, Brefeldin A, an inhibitor of trafficking of the EE to the Golgi and ER, or Nocodazole, an inhibitor of microtubule polymerization which disrupts early endosome to late endosome trafficking but not transport from the plasma membrane to early endosomes (Gao 2016).

[0583] The ability of peptide-RIG-I ligand I/O complexes to activate IRF3 in the presence of the above agents is tested by the methods of Example 36. The pattern of SEAP reporter activation in the presence of these inhibitors provides insights into the precise compartment where cytoplasmic penetration occurs.

### Example 95

### Peptide Variants for Improved Cellular Penetratoin

[0584] This example describes peptide variants for improved cellular penetration. Variants of the peptides of this disclosure are created with higher levels of cellular penetration, endosomal release, or cytoplasmic delivery. Kim et al (2016) identified a mAb (TMab4) that has cytosol penetrating activity. The pH dependent translocation event seen for TMab4 requires the protonation of acidic Glu (E) or Asp (D) residues that leads to the availability of hydrophobic interactions with the endosomal membrane. Peptides such as SEQ ID NO: 569 has 3 acidic D residues, which can occur in the alpha helix and pH dependence of cytoplasmic penetration may involve these residues. Substitution of these D residues with E residues, or adding additional E residues is tested for effects on cytoplasmic delivery. Testing is performed by complexing such a peptide with a RIG-I ligand and performing the SEAP assay described in example 36. SEQ ID NO: 568 has three Arg (R) and three Lys (K) residues. Such basic residues are common in cationic amphipathic alpha helices (TAT, R8 (SEQ ID NO: 1385), Melitin) that have cell penetration properties. These residues are pH responsive, losing their positive charge in the acidic endosomal compartment. The role of these residues in cytoplasmic delivery of SEQ ID NO: 568 is evaluated by substitution, removing the K and R residues, or adding more R or K residues, forming a complex with RIG-I, and testing for IRF3 activation by the methods in example 36. Examination of the secondary structure of SEQ ID NO: 569 reveals beta sheet as well as alpha helix components. These structures determine functional domains such as cell penetration or ligand binding. Alteration of key residues in these domains, such as those mentioned above, can be tested for effects on peptide dissociation from Annexin A2 in the endosome (trafficking), and on cytoplasmic penetration (SEAP reporter activation). By these methods, peptides with even higher levels of delivery to cells are identified for use in peptide-I/O complexes.

[0585] Any peptide of the present disclosure can comprise a peptide-I/O agent complex with similar cell penetration results, including any peptide of SEQ ID NO: 1, SEQ ID NO: 2, SEQ ID NO: 568, SEQ ID NO: 569 or SEQ ID NO: 570, or any peptide that is 80%, 85%, 90%, 95%, 96%, 97%, 98%, 99% or more identical to any of the foregoing

### Example 96

Trafficking of peptide-IL-15 complexes

[0586] By attaching a peptide of this disclosure to an IL-15 I/O, the subcellular trafficking of the IL-15 I/O is changed. The peptide can cause increase endosomal uptake of the IL-15 I/O, and can also cause it to be recycled back to the cell surface and secreted, whereas an IL-15 I/O without the peptide maybe taken up by cells, at lower levels and may be trafficking for lysosomal degradation.

[0587] CT26 or U87 cells are exposed to peptide-IL-15 agent complexes, such as those of example 18, and then imaged with immunocytochemistry. Poly-lysine coated microscopy slides are used to construct chambers. 20,000 CT26 cells per well are plated and allowed to attach overnight. Media is aspirated and the cells are incubated with 10 uM of SEQ ID NO: 1317-SEQ ID NO: 1321, an RLI, or no agent for 1, 2, 3, 4, 8, or 24 hours. The cells are then washed with PBS, fixed with 10% neutral buffered formalin for 15 min, and washed with PBS. Wells are then washed with 0.1% TBST, incubated with 0.1% TBST+10% goat serum for 45 min, and then the solution is removed. Primary antibody mix is added to the wells for 60 min at room temp, then removed and the wells are washed with 0.1% TBST. Then solution is removed and fluorescent secondary antibody solution containing 0.01% TBST, 1% goat serum, DAPI stain, and Phalloidin stain, and an appropriate dilution of Alexafluor secondary antibody are added for 45 min at room temp. The wells are washed with 0.01% TBST and allowed to air dry, then coverslipped and allowed to dry in the dark. Wells are then imaged, for instance with 20X whole slide scanners, 60X oil immersion microscope, confocal microscope (z-stack setting 0.45 microns between slices), or Deltavision microscope with z-stack setting of 0.2 microns, and then deconvoluted with algorithms as appropriate.

[0588] Stains are for Rab 5 (early endosome), Rab7 (late endosome), Rab11 (recycling endosome), and lysotracker555 (lysosome), as well as anti-His to identify the peptide-IL-15-I/O complex containing a His tag. The peptide-IL-15 complexes are shown to have higher cellular uptake, higher levels in Rab 5 and/or Rab 11 endosomes, than an RLI protein (comprising SEQ ID NO: 1169, SEQ ID No 1176, and SEQ ID No 1177) as A His-tagged RLI protein (SEQ ID NO: 1342), which has lower levels of uptake and may also have trafficking to the lysosome. Other peptide-I/O complexes can similarly exhibit upake, such as peptide-IL-15 agent complexes containing an IL-15 agent such as L₀-X-L₁-Y-L₂, wherein L₁ can be SEQ ID NO: 1169 or SEQ ID NO: 1163, X can be SEQ ID NO: 1176 or SEQ ID NO: 1179, and Y can be SEQ ID NO: 1177, SEQ ID NO: 1178, in any combination. In addition, peptide-IL-15 agent complexes can comprise any of the complexes of TABLE 4.

[0589] The same experiment is performed with U87 glioma cells and similar trafficking of peptide-IL-15 complexes with higher cellular uptake, higher levels in Rab 5 or Rab 11 endosomes than IL-15 agents along is observed.

[0590] Flow cytometry is also used to demonstrate display of an IL-15 I/O on the surface of cells by delivery as a peptide-IL-15 I/O complex. Cancer cells such as U87, CT26, or B16F10 are exposed to the peptide-IL-15 I/O complex for 0.05, 0.5, 1, 2, 4, or 24 hours. The cells are then labeled with antibodies to IL-15 or to IL-15Rα and analyzed by flow cytometry. The analysis shows that the IL-15 is displayed on the surface of the cancer cells.

[0591] Any peptide of the present disclosure can comprise a peptide-IL-15 agent complex with similar trafficking results, including any peptide of SEQ ID NO: 1, SEQ ID NO: 2, SEQ ID NO: 568, SEQ ID NO: 569 or SEQ ID NO: 570, or any peptide that is 80%, 85%, 90%, 95%, 96%, 97%, 98%, 99% or more identical to any of the foregoing.

### Example 97

### Peptide-IL-15 Agent Complex Accumulation in Tumors

[0592] This example describes peptide-IL-15 agent complex accumulation in tumors. Peptide-IL-15 agent complexes such as this in example 18 were expressed and purified. Mice were dosed with 0.2 million CT26 cells, which were allowed to grow for 5 days, at which time tumors were palpable. Mice were dosed with 1-12 μg of SEQ ID NO: 1317, SEQ ID NO: 1321, an RLI, or no agent in 100 μl 4 days a week intaperitoneally. The treatments were well tolerated. After 7 doses, the animals were sacrificed and the tumor tissue was harvested and fixed.

[0593] The sections are stained by immunohistochemistry with antibodies to His tag, to IL-15, or to IL-15 sushi+. Higher signal is seen in tumors of mice treated with SEQ ID NO: 1317, SEQ ID NO: 1321 versus treated with an RLI, confirming that attaching a peptide of this disclosure increased the accumulation of the I/O complexes in the tumor.

[0594] Any peptide of the present disclosure can comprise a peptide-IL-15 agent complex with similar tumor accumilation, including any peptide of SEQ ID NO: 1, SEQ ID NO: 2, SEQ ID NO: 568, SEQ ID NO: 569 or SEQ ID NO: 570, or any peptide that is 80%, 85%, 90%, 95%, 96%, 97%, 98%, 99% or more identical to any of the foregoing.

[0595] Other peptide-I/O complexes can similarly exhibit upake, such peptide-IL-15 agent complexes containing an IL-15 agent such as L₀-X-L₁-Y-L₂, wherein L₁ can be SEQ ID NO: 1169 or SEQ ID NO: 1163, X can be SEQ ID NO: 1176 or SEQ ID NO: 1179, and Y can be SEQ ID NO: 1177, SEQ ID NO: 1178, in any combination. In addition, peptide-IL-15 agent complexes can comprise any of the complexes of TABLE 4.

### Example 98

### Increase of Cellular Penetration of Peptide-I/O Complex, Particularly for Rig-I, MDA5, STING

[0596] This example describes increase of cellular penetration of peptide-I/O complex, particularly for Rig-I, MDA5, STING. The level of cell penetration of an I/O of this disclosure in increased by adding additional cell penetrating moieties to a peptide-I/O complex of this disclosure. Optionally one or more peptides such as the peptides of TABLE 2 are complexed to the peptide-I/O complex. Optionally, a peptide of TABLE 2 is fused or conjugated to the peptide of TABLE 1. Optionally, a peptide of TABLE 2 is placed within the linker between the peptide of TABLE 1 and the I/O. Optionally one or more hydrophobic domains, such as lipids, fatty acids, cholesterol, lithocholic acid, lauric acid, docosahexaenoic acid, docosanoic acid, (CH2)ₓ where x=1-40, is complexed to the peptide-I/O complex. Optionally, the hydrophobic domain is placed complexed to the peptide of TABLE 1 or to the I/O. Optionally the hydrophobic domain is placed within the linker between the peptide of TABLE 1 and the I/O. Optionally, the linker between the peptide of TABLE 1 and the I/O is trifunctional, with one end linked to the peptide TABLE 1, one end linked to the I/O, and one end that is linked to a moiety that increases cell penetration of the complex, such as a peptide of TABLE 2 or a hydrophobic domain.

[0597] The I/O, either as a processed or cleaved I/O complex, or as the peptide-I/O complex itself has increased delivery into any part of the cell, including the cytoplasm, the endosomes, or other subcellular compartments and/or optionally has increased cellular uptake or endosomal escape.

[0598] Any peptide of the present disclosure can comprise a peptide-I/O complex with similar cell penetration results, including any peptide of SEQ ID NO: 1, SEQ ID NO: 2, SEQ ID NO: 568, SEQ ID NO: 569 or SEQ ID NO: 570, or any peptide that is 80%, 85%, 90%, 95%, 96%, 97%, 98%, 99% or more identical to any of the foregoing.

### Example 99

### Confirmation of Activation of Rig-I Pathway

[0599] The targeting of the Rig-I or MDA5 pathway by a particular peptide-I/O complex can be confirmed by the use of one or more reporter cell lines that have gene encoding the Rig-I or MDA5 either deleted or knocked out to enable testing of the targting one or the other pathway as desired. Cell lines that can be used to directly confirm the requirement of Rig-I or MDA5 include the A549-Dual cells and the corresponding cells with Rig-I or MDA5 knocked out, A549-Dual KO-Rig-I and A549-Dual KO-MDA5. The reliance on the relevant RLRs for the response to a peptide-I/O complex can be further established using the A549-Dual KO-MAVS cell line. There may be peptide-I/O complexes that engage Rig-I or MDA5 in an unexpected way, for example, both receptors may be engaged, or there may be a biased ligand that engages a particular downstream signaling pathway, but not another. Rig-I stimulates transcription via the Type I IFN pathway using ISRE as well as through the NFKB promoter which regulate expression of different and overlapping sets of genes. MAVS also contributes to transcription of these genes, and in addition, may further engage the inflammasome that activates caspase 1 leading to activation and secrtetion of additional inflammatory molecules such as IL-1beta and IL-18. These cell lines can be used to assess the pathways sued by a particular peptide-I/O complex.

[0600] The peptide-Rig-I ligand complexes can also be tested on primary human cells to ensure that the Rig-I ligands of the discosure are able to induce Rig-I mediated responses. Peripheral blood monocytes and dendritic cells are particularly interesting as they produce IL-1b which depends on inflammasome activaton. This Rig-I pathway is independent of the IRF3 and NFKB pathways that are analyzed in the A549-Dual cell lines, and can be used to further substantiate the results of the A549-Dual cell lines. Tumor cells of different origins will also be tested, and their expression of Rig-I and MDA5 will be tested along with their responses to the Rig-I peptide-I/O complexes.

[0601] This example further describes confirmation of activation of RIG-I pathway. To confirm that the peptide-RIG-I ligand complex activates RIG-I specifically, rather than a related receptor such as MDA5, cell that do not express RIG-I can be treated with the complex and their responses compared with similar cells that do express RIG-I. Variants of the human lung carcinoma cell line A549 are used for this experiment. A549-Dual™ KO-RIG-I Cells (InvivoGen) were generated from the parent cell line (A549-Dual™) through stable knockout of the RIG-I gene. They do not express any RIG-I protein, but other pathway components are intact. The cell line carries reporter constructs to enable direct measurement of stimulation through the RIG-I pathway as well as the related NF-KB pathway.

[0602] A549-Dual KO-RIG-I and A549-Dual cells are treated with the peptide-RIG-I ligand complex. Media are collected at various time points, and the level of secreted luciferase driven by the reporter construct is measured using a reagent such as QUANTI-Luc (InvivoGen) and read on a luminometer. The relative light units (RLU) are proportional to the amount of luciferase secreted in response to the peptide-RIG-I complex. Reduced or absent luciferase secretion in the A549-Dual KO-RIG-I compared with the A549-Dual cells demonstrates that RIG-I is required for activity. This shows that the peptide-RIG-I complex directly activates RIG-I.

[0603] Any peptide of the present disclosure can comprise a peptide-RigI ligand complex with similar activation of the RigI pathway, including any peptide of SEQ ID NO: 1, SEQ ID NO: 2, SEQ ID NO: 568, SEQ ID NO: 569 or SEQ ID NO: 570, or any peptide that is 80%, 85%, 90%, 95%, 96%, 97%, 98%, 99% or more identical to any of the foregoing.

### Example 100

### In Vitro Activation of Peptide-IL-15 Agent Complexes by Tumor Cells

[0604] This example describes in vitro activation of peptide-IL-15 agent complexes by tumor cells.

[0605] Condition Media. Cancer cells, such as human or mouse cancer cell lines are exposed to a peptide-IL-15 agent complex. The cancer cells are incubated for a period of time sufficient to bind, internalize, and develop a response to the peptide-IL-15 agent complex; for example, 30 minutes, 1 hour, 2 hours, 4 hours, 8 hours, overnight, 24 hours, or 48 hours. After the designated time, the media containing the peptide-IL-15 agent complex is removed and the cells are washed to remove residual test agent. Growth media is added to the cells and placed in the tissue culture incubator for a sufficient period of time for the cells to develop a response such as to secrete processed peptide-IL-15 agent molecules into the media, for example, 1 hour, 2 hours, 4 hours, 8 hours, overnight, 24 hours. The conditioned media is then removed and tested for cytokine activity in proliferation assays using cytokine dependent cell lines; for example Mo7e (human megakaryoblastic leukemia cell line), CTLL2 (mouse cytotoxic T lymphocyte cell line), primary human CD8+ T cells, or CD8+ T cell PHA induced blasts. The conditioned media induces a proliferation response in the cytokine dependent cell lines.

[0606] Co-culture. Cancer cells, such as human or mouse cancer cell lines are exposed to a peptide-IL-15 agent complex. The cancer cells are incubated for a period of time sufficient to bind, internalize, and develop a response to the peptide-IL-15 agent complex; for example, 30 minutes, 1 hour, 2 hours, 4 hours, 8 hours, overnight, 24 hours, or 48 hours. After the designated time, the media containing the peptide-IL-15 agent complex is removed and the cells are washed to remove residual test agent. A tissue culture insert that contains a semi-permeable membrane is added to the wells containing the adherent cancer cells. A cytokine dependent cell line, for example Mo7e (human megakaryoblastic leukemia cell line) or CTLL2 (mouse cytotoxic T lymphocyte cell line) will be place on the other side of the membrane. The semi-permeable membrane will allow passive diffusion of culture media, and products secreted by the cells without allowing the cells to come in direct contact. The only source of cytokine is secreted from the cancer cells; for example processed and/or secreted peptide I/O complex. The co-culture will be returned to the tissue culture incubator for a sufficient period of time for the cytokine dependent cells to to develop a response; for example 2 hours, 4 hours, 8 hours, overnight, 24 hours, 48 hours, or 72 hours. The cytokine dependent cells are then assayed for proliferation using a viable cell assay such as PrestoBlue. The cytokine dependent cells show proliferation.

[0607] Any peptide of the present disclosure can comprise a peptide-IL-15 agent complex with similar activation of tumor cells, including any peptide of SEQ ID NO: 1, SEQ ID NO: 2, SEQ ID NO: 568, SEQ ID NO: 569 or SEQ ID NO: 570, or any peptide that is 80%, 85%, 90%, 95%, 96%, 97%, 98%, 99% or more identical to any of the foregoing.

### Example 101

### Induction of Abscopal Anti-Tumor Immunity by Rig-I- or MDA5-Ligand Peptide-I/O Complexes.

[0608] The induction of T cell mediated anti-tumor immunity results in the appearance of T cells capable of systemic action. Such T cells would be expected to function in the elimination of a primary tumor, and in addition, the eradication of subsequent metastases of the primary tumor at distal sites. Such T cells are also expected to give rise to memory T cells that will function after the disappearance of primary tumor to eradicate any relapse tumor.

[0609] The first model showing abscopal effects is the use of tumor vaccination, in which tumor cells are treated in vitro with a drug, and subsequently inoculated into mice (Fend 2017). The mice are subsequently challenged with live tumor. If the mice were pretreated with an inducer of anti-tumor T cells, then those mice will resist tumor progression. In this model, tumor cells, such as MCA205, CT26, 4T1, or others are treated in vitro with a Rig-I ligand peptide-I/O complex to induce those cells, possibly to apoptosis. The treated cells are then inoculated into mice in the flank subcutaneously. The mice are then challenged with the same tumor, untreated, at any time following the initial inoculation, for example 4 days later in the contralateral flank. The progression of tumor is then monitored at both the ipsilateral and contralateral sites. The tumor does not grow at the ipsilateral site, and there is a significant delay in tumor progression at the contralateral site. Another model to demonstrate the role of anti-tumor T cells is the use of a tumor rechallenge for mice that survive an anti-tumor treatment (Jacobsen 2018). Surviving mice that have a memory T cell response to tumor will survive a second challenge with tumor. Such T cell memory can occur following tumor treatment with particular chemotherapies, radiotherapy, or treatments with certain biologicals, such as ligands of Rig-I. Mice harboring tumors are treated with a Rig-I ligand peptide-I/O complex. The tumors regress and the mice survive. The mice are then challenged with cells from the same tumor type again. The mice survive the second challenge.

[0610] Another model is the treatment of tumors in mice by intratumoral administration of drugs, followed by the evaluation of regression of contralateral untreated tumors in the same animal (Sagiv-Barfi 2015). Two tumors of the same kind are induced in a mouse, such as one in the right flank and one in the left flank. One tumor, such as that in the right flank, is injected intratumorally with a Rig-I ligand peptide-I/O complex. The other tumor, such as that in the left flank, regresses.

[0611] Any peptide of the present disclosure can comprise a peptide-RIG-I ligand complex with similar activation of tumor cells, including any peptide of SEQ ID NO: 1, SEQ ID NO: 2, SEQ ID NO: 568, SEQ ID NO: 569 or SEQ ID NO: 570, or any peptide that is 80%, 85%, 90%, 95%, 96%, 97%, 98%, 99% or more identical to any of the foregoing.

[0612] While certain embodiments of the present disclosure have been exemplified or shown and described herein, it will be apparent to those skilled in the art that such embodiments are provided by way of example only. It is not intended that the disclosure be limited by the specific examples provided within the specification. While the disclosure has been described with reference to the aforementioned specification, the descriptions and illustrations of the embodiments herein are not meant to be construed in a limiting sense. Numerous variations, changes, and substitutions will now occur to those skilled in the art without departing from the disclosure. Furthermore, it shall be understood that all embodiments of the disclosure are not limited to the specific depictions, configurations or relative proportions set forth herein which depend upon a variety of conditions and variables. It should be understood that various alternatives to the embodiments of the disclosure described herein can be employed in practicing the disclosure. It is therefore contemplated that the disclosure shall also cover any such alternatives, modifications, variations or equivalents. It is intended that the following claims define the scope of the disclosure and that methods and structures within the scope of these claims and their equivalents be covered thereby.

1-195. (canceled)

196. A composition comprising a peptide-immuno-oncology agent complex (peptide-I/O complex), the peptide-I/O complex comprising:
a) a peptide,
wherein the peptide of the peptide-I/O complex comprises a sequence that has at least 80% sequence identity with SEQ ID NO: 568 or SEQ ID NO: 569; and
b) an immuno-oncology agent (I/O).

197. The composition of claim 196, wherein the I/O comprises, a RIG-I ligand, a 4-1BB ligand, a STING ligand, an MDA5 ligand, a CGAS ligand, a TLR3 ligand, a TLR7/8 ligand, a TLR9 ligand or an IL-15 agent.

198. The composition of claim 196, wherein the I/O comprises an agonist of a receptor or target, wherein the receptor or target comprises RIG-I, 4-1BB, STING, MDA5, CGAS, TLR, TLR7/8, TLR9 or IL-15R.

199. The composition of claim 197, wherein the I/O comprises the RIG-I ligand, and wherein the RIG-I ligand comprises a double stranded RNA (dsRNA).

200. The composition of claim 199, wherein the RIG-I ligand comprises SEQ ID NO: 1180 and SEQ ID NO: 1181, SEQ ID NO: 1182 and SEQ ID NO: 1183, SEQ ID NO: 1184 and SEQ ID NO: 1185, SEQ ID NO: 1186 and SEQ ID NO: 1187, SEQ ID NO: 1189 and SEQ ID NO: 1190, SEQ ID NO: 1191 and SEQ ID NO: 1192, SEQ ID NO: 1203 and SEQ ID NO: 1204, SEQ ID NO: 1205 and SEQ ID NO: 1206, SEQ ID NO: 1235 and SEQ ID NO: 1236, SEQ ID NO: 1237 and SEQ ID NO: 1238, SEQ ID NO: 1239 and SEQ ID NO: 1240, or, SEQ ID NO: 1241 and SEQ ID NO: 1242.

201. The composition of claim 197, wherein the I/O comprises the 4-1BB ligand, and wherein the 4-1BB ligand comprises SEQ ID NO: 1225, SEQ ID NO: 1226, SEQ ID NO: 1227, SEQ ID NO: 1228 or SEQ ID NO:1229.

202. The composition of claim 197, wherein the I/O comprises the STING ligand, and wherein the STING ligand comprises 3′,3′-cGAMP; 2′,3′-cGAMP; 3′,3′c-diGMP; 3′,3′c-diAMP; 3′,3′c-AIMP; 3′,3′-cGG; 3′,3′-cAA; 2′,3′-cdGAMP; 2′3′-cGsAMP; 2′3′-cGAVP; 2′3′-cGsAsMP; Synthetic analog of 3′,3′c-AIMP; 4-(2-chloro-6-fluorobenzy 1)-N-(furan-2-ylmethyl)-3-oxo-3,4-dihydro-2H-benzo[b][1,4]thiazine-6-car-boxamide; Synthetic analog of 2′,3′c-GAMP; dispiro diketopiperzine (DSDP); synthetic analog of cGAMP; 3′,3′ c-AIMP; 2′,3′c-AIMP; 3′,2′c-AIMP; 2′,2′c-AIMP; cAIM(PS)2; c-(dAMP-dIMP); c-(2′FdAMP-2′FdIMP); c-[2′FdAMP(S)-2′FdIMP(S)]; c-(2′FdAMP-dIMP); c-(dAMP-2′FdIMP); c-[2′FdAM(PS)-dIM(PS)]; 2,7,2″,2″-dispiro[indene-1″,3″-dione]-tetrahydrodithiazolo[3,2-a:3′,2′-d]pyrazine-5,10(5aH, 10aH)-dione; ML-RS-52-CDA; ML-RR-S2-CDA; Disodium dithio-(RP, RP)-[cyclic[A(2′,5′) pA(3′,5′)p]], or Flavone acetic acid (FAA).

203. The composition of claim 197, wherein the I/O comprises the STING ligand, and wherein the STING ligand comprises SEQ ID NO: 1513-1515.

204. The composition of claim 197, wherein the I/O comprises the MDA5 ligand and wherein the MDA5 ligand comprises a double stranded RNA (dsRNA).

205. The composition of claim 204, wherein the MDA5 ligand comprises SEQ ID NO: 1180 and SEQ ID NO: 1181, SEQ ID NO: 1182 and SEQ ID NO: 1183, SEQ ID NO: 1184 and SEQ ID NO: 1185, SEQ ID NO: 1186 and SEQ ID NO: 1187, SEQ ID NO: 1189 and SEQ ID NO: 1190, SEQ ID NO: 1191 and SEQ ID NO: 1192, SEQ ID NO: 1203 and SEQ ID NO: 1204, SEQ ID NO: 1205 and SEQ ID NO: 1206, SEQ ID NO: 1235 and SEQ ID NO: 1236, SEQ ID NO: 1237 and SEQ ID NO: 1238, SEQ ID NO: 1239 and SEQ ID NO: 1240, SEQ ID NO: 1241 and SEQ ID NO: 1242, and SEQ ID NO: 1193, and SEQ ID NO: 1194, and SEQ ID NO: 1195, and SEQ ID NO: 1196, and SEQ ID NO: 1197, and SEQ ID NO: 1198, and SEQ ID NO: 1200.

206. The composition of claim 197, wherein the I/O comprises an IL15 agent and wherein the IL15 agent comprises SEQ ID NO: 1135-1138, 1177-1178, 1491, 1342, 1176, 1432-1433, or 1501-1502.

207. The composition of claim 196, wherein the peptide-I/O complex comprises a spacer.

208. The composition of claim 196, wherein the peptide and I/O are conjugated.

209. The composition of claim 208, wherein the peptide and I/O are chemically conjugated or conjugated through recombinant fusion.

210. The composition of claim 196, wherein the peptide and the I/O are linked via a cleavable linker.

211. The composition of claim 196, wherein the peptide further comprises a diagnostic or imaging agent, wherein the diagnostic or imaging agent comprises a chemical agent, a radiolabel agent, a radio sensitizing agent, a fluorophore, an imaging agent, a diagnostic agent, a protein, or a small molecule.

212. A method of treating a disorder or a condition in a subject in need thereof, the method comprising:
administering to the subject a therapeutically effective amount of a composition comprising a peptide-immuno-oncology agent complex (peptide-I/O complex), wherein the peptide-I/O complex comprises:
a) a peptide,
wherein the peptide comprises a sequence that has at least 80% sequence identity with SEQ ID NO: 568 or SEQ ID NO: 569,
b) an immuno-oncology agent (I/O),
thereby treating the disorder or condition.

213. The method of claim 212, wherein the disorder or condition is cancer.

214. The method of claim 213, wherein the cancer is a solid tumor, a metastatic cancer lesion, a central nervous system cancer, glioma, glioblastoma, a brain cancer, a brain tumor, a breast cancer, an ovarian cancer, a melanoma, a sarcoma, a basal cell carcinoma, a squamous cell carcinoma, a skin cancer, a lung cancer, a colon cancer, a colorectal cancer, a pancreatic cancer, a prostate cancer, a bladder cancer, or any combination thereof.

215. The method of claim 212, wherein the method further comprises administering a companion diagnostic or an imaging agent,
wherein the diagnostic or imaging agent comprises a chemical agent, a radiolabel agent, radio sensitizing agent, fluorophore, an imaging agent, a diagnostic agent, a protein, or a small molecule.

216. The method of claim 215, wherein the companion diagnostic or imaging agent is detected by a device.

217. The method of claim 216, wherein the device incorporates radiology or fluorescence, wherein radiology or fluorescence comprises X-ray radiography, magnetic resonance imaging (MRI), ultrasound, endoscopy, elastography, tactile imaging, thermography, flow cytometry, medical photography, nuclear medicine functional imaging techniques, positron emission tomography (PET), single-photon emission computed tomography (SPECT), surgical instrument, operating microscope, confocal microscope, fluorescence scope, exoscope, or a surgical robot.

218. A method of delivering an immuno-oncology agent (I/O) across a blood brain barrier (BBB) of a subject, the method comprising:
a) providing the peptide-I/O complex of claim 196; and
b) administering the peptide-I/O complex to the subject, wherein the peptide I/O complex penetrates the BBB after administration.

The application's sequence listing, which the Patent Office published only in electronic form, follows.

SEQUENCE LISTING (1518 sequences)

SEQ ID NO: 1 - protein, 38 aa, synthetic construct
  REGION 1..38: note = Description of Artificial Sequence: Synthetic polypeptide
GSMCMPCFTTDHQMARKCDDCCGGKGRGKCYGPQCLCR

SEQ ID NO: 2 - protein, 38 aa, synthetic construct
  REGION 1..38: note = Description of Artificial Sequence: Synthetic polypeptide
GSMCMPCFTTDHQMARRCDDCCGGRGRGKCYGPQCLCR

SEQ ID NO: 3 - protein, 38 aa, synthetic construct
  REGION 1..38: note = Description of Artificial Sequence: Synthetic polypeptide
GSMCMPCFTTDHQMARRCDDCCGGRGRGRCYGPQCLCR

SEQ ID NO: 4 - protein, 38 aa, synthetic construct
  REGION 1..38: note = Description of Artificial Sequence: Synthetic polypeptide
GSMCMPCFTTDHQMARKCDDCCGGRGRGRCYGPQCLCR

SEQ ID NO: 5 - protein, 38 aa, synthetic construct
  REGION 1..38: note = Description of Artificial Sequence: Synthetic polypeptide
GSMCMPCFTTDHQMARRCDDCCGGKGRGRCYGPQCLCR

SEQ ID NO: 6 - protein, 38 aa, synthetic construct
  REGION 1..38: note = Description of Artificial Sequence: Synthetic polypeptide
GSMCMPCFTTHHRMAENCDICCGGDGRGKCYGPQCLCR

SEQ ID NO: 7 - protein, 38 aa, synthetic construct
  REGION 1..38: note = Description of Artificial Sequence: Synthetic polypeptide
GSMCMPCFTTDTQMQERCDRCCGGGGRGKCWGPQCLCI

SEQ ID NO: 8 - protein, 38 aa, synthetic construct
  REGION 1..38: note = Description of Artificial Sequence: Synthetic polypeptide
GSMCMPCFTTDTQMQERCDRCCGGGGRGRCWGPQCLCI

SEQ ID NO: 9 - protein, 38 aa, synthetic construct
  REGION 1..38: note = Description of Artificial Sequence: Synthetic polypeptide
GSMCMPCFTTEQRMAIICDDCCGGFGRGKCYGPQCLCR

SEQ ID NO: 10 - protein, 38 aa, synthetic construct
  REGION 1..38: note = Description of Artificial Sequence: Synthetic polypeptide
GSMCMPCFTTEQRMAIICDDCCGGFGRGRCYGPQCLCR

SEQ ID NO: 11 - protein, 38 aa, synthetic construct
  REGION 1..38: note = Description of Artificial Sequence: Synthetic polypeptide
GSICIPCFTTDHQIARRCDDCCGGRGRGKCYGPQCICR

SEQ ID NO: 12 - protein, 38 aa, synthetic construct
  REGION 1..38: note = Description of Artificial Sequence: Synthetic polypeptide
GSICIPCFTTDHQIARRCDDCCGGRGRGRCYGPQCICR

SEQ ID NO: 13 - protein, 38 aa, synthetic construct
  REGION 1..38: note = Description of Artificial Sequence: Synthetic polypeptide
GSMCMPCFTTDHRMAENCDICCGGDGRGKCYGPQCLCR

SEQ ID NO: 14 - protein, 38 aa, synthetic construct
  REGION 1..38: note = Description of Artificial Sequence: Synthetic polypeptide
GSMCMPCFTTDHRMAENCDICCGGDGRGRCYGPQCLCR

SEQ ID NO: 15 - protein, 38 aa, synthetic construct
  REGION 1..38: note = Description of Artificial Sequence: Synthetic polypeptide
GSMCMPCFTTEQRMAIICDDCCGGFGRGKCYGPQCLCI

SEQ ID NO: 16 - protein, 38 aa, synthetic construct
  REGION 1..38: note = Description of Artificial Sequence: Synthetic polypeptide
GSMCMPCFTTEQRMAIICDDCCGGFGRGRCYGPQCLCI

SEQ ID NO: 17 - protein, 38 aa, synthetic construct
  REGION 1..38: note = Description of Artificial Sequence: Synthetic polypeptide
GSICIPCFTTDHQIARRCDDCCGGRGRGKCYGPQCICI

SEQ ID NO: 18 - protein, 38 aa, synthetic construct
  REGION 1..38: note = Description of Artificial Sequence: Synthetic polypeptide
GSICIPCFTTDHQIARRCDDCCGGRGRGRCYGPQCICI

SEQ ID NO: 19 - protein, 38 aa, synthetic construct
  REGION 1..38: note = Description of Artificial Sequence: Synthetic polypeptide
GSMCMPCFTTDHRMAENCDICCGGDGRGKCYGPQCLCI

SEQ ID NO: 20 - protein, 38 aa, synthetic construct
  REGION 1..38: note = Description of Artificial Sequence: Synthetic polypeptide
GSMCMPCFTTDHRMAENCDICCGGDGRGRCYGPQCLCI

SEQ ID NO: 21 - protein, 38 aa, synthetic construct
  REGION 1..38: note = Description of Artificial Sequence: Synthetic polypeptide
GSMCMPCFTTDTQMQEKCDRCCGGGGRGRCWGPQCLCI

SEQ ID NO: 22 - protein, 38 aa, synthetic construct
  REGION 1..38: note = Description of Artificial Sequence: Synthetic polypeptide
GSMCMPCFTTEQRMAIKCDDCCGGFGRGRCYGPQCLCR

SEQ ID NO: 23 - protein, 38 aa, synthetic construct
  REGION 1..38: note = Description of Artificial Sequence: Synthetic polypeptide
GSICIPCFTTDHQIARKCDDCCGGRGRGRCYGPQCICR

SEQ ID NO: 24 - protein, 38 aa, synthetic construct
  REGION 1..38: note = Description of Artificial Sequence: Synthetic polypeptide
GSMCMPCFTTDHRMAEKCDICCGGDGRGRCYGPQCLCR

SEQ ID NO: 25 - protein, 38 aa, synthetic construct
  REGION 1..38: note = Description of Artificial Sequence: Synthetic polypeptide
GSMCMPCFTTDTQMQERCDRCCGGKGRGRCWGPQCLCI

SEQ ID NO: 26 - protein, 38 aa, synthetic construct
  REGION 1..38: note = Description of Artificial Sequence: Synthetic polypeptide
GSMCMPCFTTEQRMAIICDDCCGGKGRGRCYGPQCLCR

SEQ ID NO: 27 - protein, 38 aa, synthetic construct
  REGION 1..38: note = Description of Artificial Sequence: Synthetic polypeptide
GSICIPCFTTDHQIARRCDDCCGGKGRGRCYGPQCICR

SEQ ID NO: 28 - protein, 38 aa, synthetic construct
  REGION 1..38: note = Description of Artificial Sequence: Synthetic polypeptide
GSMCMPCFTTDHRMAENCDICCGGKGRGRCYGPQCLCR

SEQ ID NO: 29 - protein, 38 aa, synthetic construct
  REGION 1..38: note = Description of Artificial Sequence: Synthetic polypeptide
GSMCMPCFTTHHRMAENCDICCGGDGRGRCYGPQCLCR

SEQ ID NO: 30 - protein, 37 aa, synthetic construct
  REGION 1..37: note = Description of Artificial Sequence: Synthetic polypeptide
GSMCMPCFTTDTQMQERCDRCCGGGGRGRCWGPQCLC

SEQ ID NO: 31 - protein, 37 aa, synthetic construct
  REGION 1..37: note = Description of Artificial Sequence: Synthetic polypeptide
GSMCMPCFTTEQRMAIICDDCCGGFGRGRCYGPQCLC

SEQ ID NO: 32 - protein, 37 aa, synthetic construct
  REGION 1..37: note = Description of Artificial Sequence: Synthetic polypeptide
GSICIPCFTTDHQIARRCDDCCGGRGRGRCYGPQCIC

SEQ ID NO: 33 - protein, 37 aa, synthetic construct
  REGION 1..37: note = Description of Artificial Sequence: Synthetic polypeptide
GSMCMPCFTTDHRMAENCDICCGGDGRGRCYGPQCLC

SEQ ID NO: 34 - protein, 38 aa, synthetic construct
  REGION 1..38: note = Description of Artificial Sequence: Synthetic polypeptide
GSMCMPCFTTDHQMARRCDDCCGGRGRGRCYGPQCLCI

SEQ ID NO: 35 - protein, 38 aa, synthetic construct
  REGION 1..38: note = Description of Artificial Sequence: Synthetic polypeptide
GSACAPCFTTDHQAARRCDDCCGGRGRGKCYGPQCLCR

SEQ ID NO: 36 - protein, 38 aa, synthetic construct
  REGION 1..38: note = Description of Artificial Sequence: Synthetic polypeptide
GSACAPCFTTDHQAARKCDDCCGGKGRGKCYGPQCLCR

SEQ ID NO: 37 - protein, 38 aa, synthetic construct
  REGION 1..38: note = Description of Artificial Sequence: Synthetic polypeptide
GSMCMPCFTTHHRMAENCDICCGGDGRGKCYGPQCLCI

SEQ ID NO: 38 - protein, 37 aa, synthetic construct
  REGION 1..37: note = Description of Artificial Sequence: Synthetic polypeptide
GSMCMPCFTTHHRMAENCDICCGGDGRGKCYGPQCLC

SEQ ID NO: 39 - protein, 37 aa, synthetic construct
  REGION 1..37: note = Description of Artificial Sequence: Synthetic polypeptide
GSMCMPCFTTDHQMARRCDDCCGGRGRGRCYGPQCLC

SEQ ID NO: 40 - protein, 38 aa, synthetic construct
  REGION 1..38: note = Description of Artificial Sequence: Synthetic polypeptide
GSMCMPCFTTHHQMAENCDICCGGDGRGKCYGPQCLCR

SEQ ID NO: 41 - protein, 38 aa, synthetic construct
  REGION 1..38: note = Description of Artificial Sequence: Synthetic polypeptide
GSMCMPCFTTHHRMARNCDICCGGDGRGKCYGPQCLCR

SEQ ID NO: 42 - protein, 38 aa, synthetic construct
  REGION 1..38: note = Description of Artificial Sequence: Synthetic polypeptide
GSMCMPCFTTHHRMAERCDICCGGDGRGKCYGPQCLCR

SEQ ID NO: 43 - protein, 38 aa, synthetic construct
  REGION 1..38: note = Description of Artificial Sequence: Synthetic polypeptide
GSMCMPCFTTHHRMAENCDDCCGGDGRGKCYGPQCLCR

SEQ ID NO: 44 - protein, 38 aa, synthetic construct
  REGION 1..38: note = Description of Artificial Sequence: Synthetic polypeptide
GSRCMPCFTTDHQMARRCDDCCGGRGRGKCYGPQCLCR

SEQ ID NO: 45 - protein, 38 aa, synthetic construct
  REGION 1..38: note = Description of Artificial Sequence: Synthetic polypeptide
GSICIPCFTTDHQIARRCDDCCGGRGRGKCYGPQCLCR

SEQ ID NO: 46 - protein, 38 aa, synthetic construct
  REGION 1..38: note = Description of Artificial Sequence: Synthetic polypeptide
GSMCLPCFTTDHQLARRCDDCCGGRGRGKCYGPQCLCR

SEQ ID NO: 47 - protein, 38 aa, synthetic construct
  REGION 1..38: note = Description of Artificial Sequence: Synthetic polypeptide
GSMCMPCFTTEHQMARRCEECCGGRGRGKCYGPQCLCR

SEQ ID NO: 48 - protein, 38 aa, synthetic construct
  REGION 1..38: note = Description of Artificial Sequence: Synthetic polypeptide
GSMCIPCFTTDHQMARRCEECCGGRGRGKCYGPQCLCR

SEQ ID NO: 49 - protein, 38 aa, synthetic construct
  REGION 1..38: note = Description of Artificial Sequence: Synthetic polypeptide
GSICIPCFTTDHQMARRCDDCCGGRGDGKCYGPQCLCR

SEQ ID NO: 50 - protein, 38 aa, synthetic construct
  REGION 1..38: note = Description of Artificial Sequence: Synthetic polypeptide
GSRCMPCFTTDHFMARFCDFCCGGRGRGKCYGPQCLCR

SEQ ID NO: 51 - protein, 38 aa, synthetic construct
  REGION 1..38: note = Description of Artificial Sequence: Synthetic polypeptide
GSRCMPCFTTDHYMARYCDYCCGGRGRGKCYGPQCLCR

SEQ ID NO: 52 - protein, 38 aa, synthetic construct
  REGION 1..38: note = Description of Artificial Sequence: Synthetic polypeptide
GSRCMPCFTTDHRMARRCDRCCGGRGRGKCYGPQCLCR

SEQ ID NO: 53 - protein, 38 aa, synthetic construct
  REGION 1..38: note = Description of Artificial Sequence: Synthetic polypeptide
GSRCMPCFTTDHEMARECDECCGGRGRGKCYGPQCLCR

SEQ ID NO: 54 - protein, 38 aa, synthetic construct
  REGION 1..38: note = Description of Artificial Sequence: Synthetic polypeptide
GSRCMPCFTTDHHMARHCDHCCGGRGRGKCYGPQCLCR

SEQ ID NO: 55 - protein, 38 aa, synthetic construct
  REGION 1..38: note = Description of Artificial Sequence: Synthetic polypeptide
GSLCLPCFTTHHRLADQCDICCGGDGRGKCYGPQCLCR

SEQ ID NO: 56 - protein, 38 aa, synthetic construct
  REGION 1..38: note = Description of Artificial Sequence: Synthetic polypeptide
GSICIPCFTTEHQIARRCEECCGGRGRGKCYGPQCLCR

SEQ ID NO: 57 - protein, 38 aa, synthetic construct
  REGION 1..38: note = Description of Artificial Sequence: Synthetic polypeptide
GSMCMPCFTTIYRMAHECDECCGGRGRGKCYGPQCLCR

SEQ ID NO: 58 - protein, 38 aa, synthetic construct
  REGION 1..38: note = Description of Artificial Sequence: Synthetic polypeptide
GSMCMPCFTTGYRMAEYCDICCGGRGRGKCYGPQCLCR

SEQ ID NO: 59 - protein, 38 aa, synthetic construct
  REGION 1..38: note = Description of Artificial Sequence: Synthetic polypeptide
GSMCMPCFTTHRRMANTCDACCGGRSRGKCYGPQCLCR

SEQ ID NO: 60 - protein, 38 aa, synthetic construct
  REGION 1..38: note = Description of Artificial Sequence: Synthetic polypeptide
GSHCMPCFTTDHQMIRRCDDCCGGGSYGKCDGPQCLCF

SEQ ID NO: 61 - protein, 38 aa, synthetic construct
  REGION 1..38: note = Description of Artificial Sequence: Synthetic polypeptide
GSDCMPCFTTDHRMADHCDICCGGDDRGKCYGPQCLCR

SEQ ID NO: 62 - protein, 38 aa, synthetic construct
  REGION 1..38: note = Description of Artificial Sequence: Synthetic polypeptide
GSMCMPCFTTDHEMERRCDDCCGIGGGGKCHGPQCLCG

SEQ ID NO: 63 - protein, 38 aa, synthetic construct
  REGION 1..38: note = Description of Artificial Sequence: Synthetic polypeptide
GSMCMPCFTTSEQMFRRCDDCCGGWGDGKCNGPHCLCR

SEQ ID NO: 64 - protein, 36 aa, synthetic construct
  REGION 1..36: note = Description of Artificial Sequence: Synthetic polypeptide
GSCGPCFTTDHQMEQKCAECCGGIGKCYGPQCLCNR

SEQ ID NO: 65 - protein, 40 aa, synthetic construct
  REGION 1..40: note = Description of Artificial Sequence: Synthetic polypeptide
GSRCGPCFTTDPQTQAKCSECCGRKGGVCKGPQCICGIQY

SEQ ID NO: 66 - protein, 37 aa, synthetic construct
  REGION 1..37: note = Description of Artificial Sequence: Synthetic polypeptide
GSMCMPCFTTDPNMAKKCRDCCGGNGKCFGPQCLCNR

SEQ ID NO: 67 - protein, 36 aa, synthetic construct
  REGION 1..36: note = Description of Artificial Sequence: Synthetic polypeptide
GSMCMPCFTTDHNMAKKCNDCCGGYGKCFGPQCLCR

SEQ ID NO: 68 - protein, 38 aa, synthetic construct
  REGION 1..38: note = Description of Artificial Sequence: Synthetic polypeptide
GSRCPPCFTTNPNMEADCRKCCGGRGYCASYQCICPGG

SEQ ID NO: 69 - protein, 37 aa, synthetic construct
  REGION 1..37: note = Description of Artificial Sequence: Synthetic polypeptide
GSMCMPCFTTDPNMANKCRDCCGGGKKCFGPQCLCNR

SEQ ID NO: 70 - protein, 64 aa, synthetic construct
  REGION 1..64: note = Description of Artificial Sequence: Synthetic polypeptide
GSMKFLYGVILIALFLTVMTATLSEARCGPCFTTDPQTQAKCSECCGRKGGVCKGPQCICGIQY

SEQ ID NO: 71 - protein, 38 aa, synthetic construct
  REGION 1..38: note = Description of Artificial Sequence: Synthetic polypeptide
GSMCMPCFTTRPDMAQQCRACCKGRGKCFGPQCLCGYD

SEQ ID NO: 72 - protein, 62 aa, synthetic construct
  REGION 1..62: note = Description of Artificial Sequence: Synthetic polypeptide
GSMKFLYGIVFIALFLTVMTATLSDAMCMPCFTTDHNMAKKCRDCCGGNGKCFGPQCLCNRG

SEQ ID NO: 73 - protein, 37 aa, synthetic construct
  REGION 1..37: note = Description of Artificial Sequence: Synthetic polypeptide
GSMCMPCFTTDHNMAKKCRDCCGGNGKCFGPQCLCNR

SEQ ID NO: 74 - protein, 62 aa, synthetic construct
  REGION 1..62: note = Description of Artificial Sequence: Synthetic polypeptide
GSMKFLYGIVFITLFLTVMIATHTEAMCMPCFTTRPNMAQQCRDCCRGRGKCFGPQCLCGYD

SEQ ID NO: 75 - protein, 62 aa, synthetic construct
  REGION 1..62: note = Description of Artificial Sequence: Synthetic polypeptide
GSMKFLYGIVFIALFLTVMIATHTEAMCMPCFTTRPNMAQQCRDCCRGRGKCFGPQCLCGYD

SEQ ID NO: 76 - protein, 37 aa, synthetic construct
  REGION 1..37: note = Description of Artificial Sequence: Synthetic polypeptide
GSRCKPCFTTDPQMSKKCADCCGGKGKGKCYGPQCLC

SEQ ID NO: 77 - protein, 63 aa, synthetic construct
  REGION 1..63: note = Description of Artificial Sequence: Synthetic polypeptide
GSMKFLYGIVFITLFLTVMIATHTEAAMCMPCFTTNLNMEQECRDCCGGTGRCFGPQCLCGYD

SEQ ID NO: 78 - protein, 40 aa, synthetic construct
  REGION 1..40: note = Description of Artificial Sequence: Synthetic polypeptide
GSRCSPCFTTDQQMTKKCYDCCGGKGKGKCYGPQCICAPY

SEQ ID NO: 79 - protein, 37 aa, synthetic construct
  REGION 1..37: note = Description of Artificial Sequence: Synthetic polypeptide
GSCGPCFTTDPYTESKCATCCGGRGKCVGPQCLCNRI

SEQ ID NO: 80 - protein, 41 aa, synthetic construct
  REGION 1..41: note = Description of Artificial Sequence: Synthetic polypeptide
GSTEAMCMPCFTTDHNMAKKCRDCCGGNGKCFGYQCLCNRG

SEQ ID NO: 81 - protein, 61 aa, synthetic construct
  REGION 1..61: note = Description of Artificial Sequence: Synthetic polypeptide
GSMKFLYGIVFIALFLTVMFATQTDGCGPCFTTDANMARKCRECCGGIGKCFGPQCLCNRI

SEQ ID NO: 82 - protein, 61 aa, synthetic construct
  REGION 1..61: note = Description of Artificial Sequence: Synthetic polypeptide
GSMKFLYGIVFIALFLTVMFATQTDGCGPCFTTDANMARKCRECCGGNGKCFGPQCLCNRE

SEQ ID NO: 83 - protein, 62 aa, synthetic construct
  REGION 1..62: note = Description of Artificial Sequence: Synthetic polypeptide
GSMKFLYGTILIAFFLTVMIATHSEARCPPCFTTNPNMEADCRKCCGGRGYCASYQCICPGG

SEQ ID NO: 84 - protein, 41 aa, synthetic construct
  REGION 1..41: note = Description of Artificial Sequence: Synthetic polypeptide
GSTEAMCMPCFTTRPDMAQQCRDCCGGNGKCFGYQCLCNRG

SEQ ID NO: 85 - protein, 62 aa, synthetic construct
  REGION 1..62: note = Description of Artificial Sequence: Synthetic polypeptide
GSMKFLYGIVFIALFLTVMIATLTEAMCMPCFTTRPDMAQQCRDCCGGNGKCFGYQCLCNRG

SEQ ID NO: 86 - protein, 62 aa, synthetic construct
  REGION 1..62: note = Description of Artificial Sequence: Synthetic polypeptide
GSMKFLYGIVFIALFLTVMIATHTEAMCMPCFTTRPDMAQQCRDCCGGNGKCFGYQCLCNRG

SEQ ID NO: 87 - protein, 63 aa, synthetic construct
  REGION 1..63: note = Description of Artificial Sequence: Synthetic polypeptide
GSMKFLYGIILIALFLTVMIATHSEARCPNCFTTNPNAEADCKKCCGNRWGKCAGYQCVCPMK

SEQ ID NO: 88 - protein, 69 aa, synthetic construct
  REGION 1..69: note = Description of Artificial Sequence: Synthetic polypeptide
GSMKFLYGIVFIALFLTGMIATHTEAMCMPCFTTRPDMAQQCRDCCGGNGKCFGYQCLCNRGRIVIMYT

SEQ ID NO: 89 - protein, 37 aa, synthetic construct
  REGION 1..37: note = Description of Artificial Sequence: Synthetic polypeptide
GSMCMPCFTTRPGMAQQCRDCCGGNGKCFGYQCLCNR

SEQ ID NO: 90 - protein, 37 aa, synthetic construct
  REGION 1..37: note = Description of Artificial Sequence: Synthetic polypeptide
GSMCIPCFTTNPNMAAKCNACCGSRRGSCRGPQCICR

SEQ ID NO: 91 - protein, 37 aa, synthetic construct
  REGION 1..37: note = Description of Artificial Sequence: Synthetic polypeptide
GSMCIPCFTTNPNMAAKCNACCGSRRGSCRGPQCICN

SEQ ID NO: 92 - protein, 36 aa, synthetic construct
  REGION 1..36: note = Description of Artificial Sequence: Synthetic polypeptide
GSMCIPCFTTNPNMAAKCNACCGGNGSCRGPQCICN

SEQ ID NO: 93 - protein, 38 aa, synthetic construct
  REGION 1..38: note = Description of Artificial Sequence: Synthetic polypeptide
GSMCIPCFTTNPNMAAKCNACCGSRGRGSCRGPQCICN

SEQ ID NO: 94 - protein, 38 aa, synthetic construct
  REGION 1..38: note = Description of Artificial Sequence: Synthetic polypeptide
GSMCIPCFTTNPNMAAKCNACCGSRGRGKCRGPQCICN

SEQ ID NO: 95 - protein, 37 aa, synthetic construct
  REGION 1..37: note = Description of Artificial Sequence: Synthetic polypeptide
GSMCIPCFTTDHQMAAKCNACCGSRRGSCRGPQCICN

SEQ ID NO: 96 - protein, 37 aa, synthetic construct
  REGION 1..37: note = Description of Artificial Sequence: Synthetic polypeptide
GSMCIPCFTTNHQMAAKCNACCGSRRGSCRGPQCICN

SEQ ID NO: 97 - protein, 38 aa, synthetic construct
  REGION 1..38: note = Description of Artificial Sequence: Synthetic polypeptide
GSMCIPCFTTNPNMARKCNACCGSRGRGSCRGPQCICN

SEQ ID NO: 98 - protein, 38 aa, synthetic construct
  REGION 1..38: note = Description of Artificial Sequence: Synthetic polypeptide
GSMCIPCFTTNPNMAAKCNACCGGKGRGSCRGPQCICN

SEQ ID NO: 99 - protein, 37 aa, synthetic construct
  REGION 1..37: note = Description of Artificial Sequence: Synthetic polypeptide
GSMCIPCFTTNPNMAAKCNACCGSRRGSCFGPQCICN

SEQ ID NO: 100 - protein, 38 aa, synthetic construct
  REGION 1..38: note = Description of Artificial Sequence: Synthetic polypeptide
GSMCIPCFTTNPNMAAKCNACCGSRGRGKCFGPQCICN

SEQ ID NO: 101 - protein, 38 aa, synthetic construct
  REGION 1..38: note = Description of Artificial Sequence: Synthetic polypeptide
GSMCIPCFTTNPNMAAKCNACCGSRGRGSCFGPQCICN

SEQ ID NO: 102 - protein, 38 aa, synthetic construct
  REGION 1..38: note = Description of Artificial Sequence: Synthetic polypeptide
GSMCIPCFTTNPNMAAKCNACCGSRGRGSCYGPQCICN

SEQ ID NO: 103 - protein, 37 aa, synthetic construct
  REGION 1..37: note = Description of Artificial Sequence: Synthetic polypeptide
GSMCIPCFTTNPNMAAKCDACCGSRRGSCRGPQCICN

SEQ ID NO: 104 - protein, 37 aa, synthetic construct
  REGION 1..37: note = Description of Artificial Sequence: Synthetic polypeptide
GSMCIPCFTTNHQMAAKCDACCGSRRGSCRGPQCICN

SEQ ID NO: 105 - protein, 38 aa, synthetic construct
  REGION 1..38: note = Description of Artificial Sequence: Synthetic polypeptide
GSMCIPCFTTNHNMAAKCDACCGGRGRGSCRGPQCICN

SEQ ID NO: 106 - protein, 38 aa, synthetic construct
  REGION 1..38: note = Description of Artificial Sequence: Synthetic polypeptide
GSMCIPCFTTNPNMAAKCDACCGSRGRGSCRGPQCICN

SEQ ID NO: 107 - protein, 38 aa, synthetic construct
  REGION 1..38: note = Description of Artificial Sequence: Synthetic polypeptide
GSMCIPCFTTNPNMAAKCDACCGGKGRGSCRGPQCICN

SEQ ID NO: 108 - protein, 38 aa, synthetic construct
  REGION 1..38: note = Description of Artificial Sequence: Synthetic polypeptide
GSMCIPCFTTNHNMAAKCDACCGSRGRGSCRGPQCICN

SEQ ID NO: 109 - protein, 36 aa, synthetic construct
  REGION 1..36: note = Description of Artificial Sequence: Synthetic polypeptide
GSMCIPCFTTNPNMAAKCRDCCGGRGSCRGPQCICN

SEQ ID NO: 110 - protein, 38 aa, synthetic construct
  REGION 1..38: note = Description of Artificial Sequence: Synthetic polypeptide
GSMCMPCFTTNPNMAAKCDDCCGSRGRGSCRGPQCICN

SEQ ID NO: 111 - protein, 36 aa, synthetic construct
  REGION 1..36: note = Description of Artificial Sequence: Synthetic polypeptide
GSMCIPCFTTNPNMAARCNACCGSRRGSCRGPQCIC

SEQ ID NO: 112 - protein, 37 aa, synthetic construct
  REGION 1..37: note = Description of Artificial Sequence: Synthetic polypeptide
GSMCIPCFTTNPNMAAKCNACCGSRRGSCRGPQCICI

SEQ ID NO: 113 - protein, 38 aa, synthetic construct
  REGION 1..38: note = Description of Artificial Sequence: Synthetic polypeptide
GSMCMPCFTTDHQMARACDDCCGGKGRGKCYGPQCLCR

SEQ ID NO: 114 - protein, 38 aa, synthetic construct
  REGION 1..38: note = Description of Artificial Sequence: Synthetic polypeptide
GSMCMPCFTTDHQMARRCDDCCGGKGRGKCYGPQCLCR

SEQ ID NO: 115 - protein, 38 aa, synthetic construct
  REGION 1..38: note = Description of Artificial Sequence: Synthetic polypeptide
GSMCMPCFTTDHQMARKCDDCCGGAGRGKCYGPQCLCR

SEQ ID NO: 116 - protein, 38 aa, synthetic construct
  REGION 1..38: note = Description of Artificial Sequence: Synthetic polypeptide
GSMCMPCFTTDHQMARACDDCCGGAGRGKCYGPQCLCR

SEQ ID NO: 117 - protein, 38 aa, synthetic construct
  REGION 1..38: note = Description of Artificial Sequence: Synthetic polypeptide
GSMCMPCFTTDHQMARRCDDCCGGAGRGKCYGPQCLCR

SEQ ID NO: 118 - protein, 38 aa, synthetic construct
  REGION 1..38: note = Description of Artificial Sequence: Synthetic polypeptide
GSMCMPCFTTDHQMARKCDDCCGGRGRGKCYGPQCLCR

SEQ ID NO: 119 - protein, 38 aa, synthetic construct
  REGION 1..38: note = Description of Artificial Sequence: Synthetic polypeptide
GSMCMPCFTTDHQMARACDDCCGGRGRGKCYGPQCLCR

SEQ ID NO: 120 - protein, 38 aa, synthetic construct
  REGION 1..38: note = Description of Artificial Sequence: Synthetic polypeptide
GSMCMPCFTTDHQMARKCDDCCGGKGRGACYGPQCLCR

SEQ ID NO: 121 - protein, 38 aa, synthetic construct
  REGION 1..38: note = Description of Artificial Sequence: Synthetic polypeptide
GSMCMPCFTTDHQMARACDDCCGGKGRGACYGPQCLCR

SEQ ID NO: 122 - protein, 38 aa, synthetic construct
  REGION 1..38: note = Description of Artificial Sequence: Synthetic polypeptide
GSMCMPCFTTDHQMARRCDDCCGGKGRGACYGPQCLCR

SEQ ID NO: 123 - protein, 38 aa, synthetic construct
  REGION 1..38: note = Description of Artificial Sequence: Synthetic polypeptide
GSMCMPCFTTDHQMARKCDDCCGGAGRGACYGPQCLCR

SEQ ID NO: 124 - protein, 38 aa, synthetic construct
  REGION 1..38: note = Description of Artificial Sequence: Synthetic polypeptide
GSMCMPCFTTDHQMARACDDCCGGAGRGACYGPQCLCR

SEQ ID NO: 125 - protein, 38 aa, synthetic construct
  REGION 1..38: note = Description of Artificial Sequence: Synthetic polypeptide
GSMCMPCFTTDHQMARRCDDCCGGAGRGACYGPQCLCR

SEQ ID NO: 126 - protein, 38 aa, synthetic construct
  REGION 1..38: note = Description of Artificial Sequence: Synthetic polypeptide
GSMCMPCFTTDHQMARKCDDCCGGRGRGACYGPQCLCR

SEQ ID NO: 127 - protein, 38 aa, synthetic construct
  REGION 1..38: note = Description of Artificial Sequence: Synthetic polypeptide
GSMCMPCFTTDHQMARACDDCCGGRGRGACYGPQCLCR

SEQ ID NO: 128 - protein, 38 aa, synthetic construct
  REGION 1..38: note = Description of Artificial Sequence: Synthetic polypeptide
GSMCMPCFTTDHQMARRCDDCCGGRGRGACYGPQCLCR

SEQ ID NO: 129 - protein, 38 aa, synthetic construct
  REGION 1..38: note = Description of Artificial Sequence: Synthetic polypeptide
GSMCMPCFTTDHQMARKCDDCCGGKGRGRCYGPQCLCR

SEQ ID NO: 130 - protein, 38 aa, synthetic construct
  REGION 1..38: note = Description of Artificial Sequence: Synthetic polypeptide
GSMCMPCFTTDHQMARACDDCCGGKGRGRCYGPQCLCR

SEQ ID NO: 131 - protein, 38 aa, synthetic construct
  REGION 1..38: note = Description of Artificial Sequence: Synthetic polypeptide
GSMCMPCFTTDHQMARKCDDCCGGAGRGRCYGPQCLCR

SEQ ID NO: 132 - protein, 38 aa, synthetic construct
  REGION 1..38: note = Description of Artificial Sequence: Synthetic polypeptide
GSMCMPCFTTDHQMARACDDCCGGAGRGRCYGPQCLCR

SEQ ID NO: 133 - protein, 38 aa, synthetic construct
  REGION 1..38: note = Description of Artificial Sequence: Synthetic polypeptide
GSMCMPCFTTDHQMARRCDDCCGGAGRGRCYGPQCLCR

SEQ ID NO: 134 - protein, 38 aa, synthetic construct
  REGION 1..38: note = Description of Artificial Sequence: Synthetic polypeptide
GSMCMPCFTTDHQMARACDDCCGGRGRGRCYGPQCLCR

SEQ ID NO: 135 - protein, 38 aa, synthetic construct
  REGION 1..38: note = Description of Artificial Sequence: Synthetic polypeptide
GSKCMPCFTTDHQMARRCDDCCGGRGRGRCYGPQCLCR

SEQ ID NO: 136 - protein, 38 aa, synthetic construct
  REGION 1..38: note = Description of Artificial Sequence: Synthetic polypeptide
GSACAPCFTTDHQAARRCDDCCGGRGRGRCYGPQCLCR

SEQ ID NO: 137 - protein, 38 aa, synthetic construct
  REGION 1..38: note = Description of Artificial Sequence: Synthetic polypeptide
GSKCAPCFTTDHQAARRCDDCCGGRGRGRCYGPQCLCR

SEQ ID NO: 138 - protein, 38 aa, synthetic construct
  REGION 1..38: note = Description of Artificial Sequence: Synthetic polypeptide
  SITE 17: note = MOD_RES - Citrulline
  SITE 25: note = MOD_RES - Citrulline
GSMCMPCFTTDHQMARXCDDCCGGXGRGKCYGPQCLCR

SEQ ID NO: 139 - protein, 38 aa, synthetic construct
  REGION 1..38: note = Description of Artificial Sequence: Synthetic polypeptide
  SITE 17: note = MOD_RES - Citrulline
  SITE 25: note = MOD_RES - Citrulline
  SITE 29: note = MOD_RES - Citrulline
GSMCMPCFTTDHQMARXCDDCCGGXGRGXCYGPQCLCR

SEQ ID NO: 140 - protein, 38 aa, synthetic construct
  REGION 1..38: note = Description of Artificial Sequence: Synthetic polypeptide
  SITE 17: note = MOD_RES - Citrulline
  SITE 25: note = MOD_RES - Citrulline
  SITE 29: note = MOD_RES - Citrulline
GSKCMPCFTTDHQMARXCDDCCGGXGRGXCYGPQCLCR

SEQ ID NO: 141 - protein, 38 aa, synthetic construct
  REGION 1..38: note = Description of Artificial Sequence: Synthetic polypeptide
  SITE 17: note = MOD_RES - Citrulline
  SITE 25: note = MOD_RES - Citrulline
GSACAPCFTTDHQAARXCDDCCGGXGRGKCYGPQCLCR

SEQ ID NO: 142 - protein, 38 aa, synthetic construct
  REGION 1..38: note = Description of Artificial Sequence: Synthetic polypeptide
  SITE 17: note = MOD_RES - Citrulline
  SITE 25: note = MOD_RES - Citrulline
  SITE 29: note = MOD_RES - Citrulline
GSACAPCFTTDHQAARXCDDCCGGXGRGXCYGPQCLCR

SEQ ID NO: 143 - protein, 38 aa, synthetic construct
  REGION 1..38: note = Description of Artificial Sequence: Synthetic polypeptide
  SITE 17: note = MOD_RES - Citrulline
  SITE 25: note = MOD_RES - Citrulline
  SITE 29: note = MOD_RES - Citrulline
GSKCAPCFTTDHQAARXCDDCCGGXGRGXCYGPQCLCR

SEQ ID NO: 144 - protein, 45 aa, synthetic construct
  REGION 1..45: note = Description of Artificial Sequence: Synthetic polypeptide
GSMCMPCFTTDHQMARKCDDCCGGKGRGKCYGPQCLCRGAGAAGG

SEQ ID NO: 145 - protein, 45 aa, synthetic construct
  REGION 1..45: note = Description of Artificial Sequence: Synthetic polypeptide
GSMCMPCFTTDHQMARACDDCCGGKGRGKCYGPQCLCRGAGAAGG

SEQ ID NO: 146 - protein, 45 aa, synthetic construct
  REGION 1..45: note = Description of Artificial Sequence: Synthetic polypeptide
GSMCMPCFTTDHQMARRCDDCCGGKGRGKCYGPQCLCRGAGAAGG

SEQ ID NO: 147 - protein, 45 aa, synthetic construct
  REGION 1..45: note = Description of Artificial Sequence: Synthetic polypeptide
GSMCMPCFTTDHQMARKCDDCCGGAGRGKCYGPQCLCRGAGAAGG

SEQ ID NO: 148 - protein, 45 aa, synthetic construct
  REGION 1..45: note = Description of Artificial Sequence: Synthetic polypeptide
GSMCMPCFTTDHQMARACDDCCGGAGRGKCYGPQCLCRGAGAAGG

SEQ ID NO: 149 - protein, 45 aa, synthetic construct
  REGION 1..45: note = Description of Artificial Sequence: Synthetic polypeptide
GSMCMPCFTTDHQMARRCDDCCGGAGRGKCYGPQCLCRGAGAAGG

SEQ ID NO: 150 - protein, 45 aa, synthetic construct
  REGION 1..45: note = Description of Artificial Sequence: Synthetic polypeptide
GSMCMPCFTTDHQMARKCDDCCGGRGRGKCYGPQCLCRGAGAAGG

SEQ ID NO: 151 - protein, 45 aa, synthetic construct
  REGION 1..45: note = Description of Artificial Sequence: Synthetic polypeptide
GSMCMPCFTTDHQMARACDDCCGGRGRGKCYGPQCLCRGAGAAGG

SEQ ID NO: 152 - protein, 45 aa, synthetic construct
  REGION 1..45: note = Description of Artificial Sequence: Synthetic polypeptide
GSMCMPCFTTDHQMARRCDDCCGGRGRGKCYGPQCLCRGAGAAGG

SEQ ID NO: 153 - protein, 45 aa, synthetic construct
  REGION 1..45: note = Description of Artificial Sequence: Synthetic polypeptide
GSMCMPCFTTDHQMARKCDDCCGGKGRGACYGPQCLCRGAGAAGG

SEQ ID NO: 154 - protein, 45 aa, synthetic construct
  REGION 1..45: note = Description of Artificial Sequence: Synthetic polypeptide
GSMCMPCFTTDHQMARACDDCCGGKGRGACYGPQCLCRGAGAAGG

SEQ ID NO: 155 - protein, 45 aa, synthetic construct
  REGION 1..45: note = Description of Artificial Sequence: Synthetic polypeptide
GSMCMPCFTTDHQMARRCDDCCGGKGRGACYGPQCLCRGAGAAGG

SEQ ID NO: 156 - protein, 45 aa, synthetic construct
  REGION 1..45: note = Description of Artificial Sequence: Synthetic polypeptide
GSMCMPCFTTDHQMARKCDDCCGGAGRGACYGPQCLCRGAGAAGG

SEQ ID NO: 157 - protein, 45 aa, synthetic construct
  REGION 1..45: note = Description of Artificial Sequence: Synthetic polypeptide
GSMCMPCFTTDHQMARACDDCCGGAGRGACYGPQCLCRGAGAAGG

SEQ ID NO: 158 - protein, 45 aa, synthetic construct
  REGION 1..45: note = Description of Artificial Sequence: Synthetic polypeptide
GSMCMPCFTTDHQMARRCDDCCGGAGRGACYGPQCLCRGAGAAGG

SEQ ID NO: 159 - protein, 45 aa, synthetic construct
  REGION 1..45: note = Description of Artificial Sequence: Synthetic polypeptide
GSMCMPCFTTDHQMARKCDDCCGGRGRGACYGPQCLCRGAGAAGG

SEQ ID NO: 160 - protein, 45 aa, synthetic construct
  REGION 1..45: note = Description of Artificial Sequence: Synthetic polypeptide
GSMCMPCFTTDHQMARACDDCCGGRGRGACYGPQCLCRGAGAAGG

SEQ ID NO: 161 - protein, 45 aa, synthetic construct
  REGION 1..45: note = Description of Artificial Sequence: Synthetic polypeptide
GSMCMPCFTTDHQMARRCDDCCGGRGRGACYGPQCLCRGAGAAGG

SEQ ID NO: 162 - protein, 45 aa, synthetic construct
  REGION 1..45: note = Description of Artificial Sequence: Synthetic polypeptide
GSMCMPCFTTDHQMARKCDDCCGGKGRGRCYGPQCLCRGAGAAGG

SEQ ID NO: 163 - protein, 45 aa, synthetic construct
  REGION 1..45: note = Description of Artificial Sequence: Synthetic polypeptide
GSMCMPCFTTDHQMARACDDCCGGKGRGRCYGPQCLCRGAGAAGG

SEQ ID NO: 164 - protein, 45 aa, synthetic construct
  REGION 1..45: note = Description of Artificial Sequence: Synthetic polypeptide
GSMCMPCFTTDHQMARRCDDCCGGKGRGRCYGPQCLCRGAGAAGG

SEQ ID NO: 165 - protein, 45 aa, synthetic construct
  REGION 1..45: note = Description of Artificial Sequence: Synthetic polypeptide
GSMCMPCFTTDHQMARKCDDCCGGAGRGRCYGPQCLCRGAGAAGG

SEQ ID NO: 166 - protein, 45 aa, synthetic construct
  REGION 1..45: note = Description of Artificial Sequence: Synthetic polypeptide
GSMCMPCFTTDHQMARACDDCCGGAGRGRCYGPQCLCRGAGAAGG

SEQ ID NO: 167 - protein, 45 aa, synthetic construct
  REGION 1..45: note = Description of Artificial Sequence: Synthetic polypeptide
GSMCMPCFTTDHQMARRCDDCCGGAGRGRCYGPQCLCRGAGAAGG

SEQ ID NO: 168 - protein, 45 aa, synthetic construct
  REGION 1..45: note = Description of Artificial Sequence: Synthetic polypeptide
GSMCMPCFTTDHQMARKCDDCCGGRGRGRCYGPQCLCRGAGAAGG

SEQ ID NO: 169 - protein, 45 aa, synthetic construct
  REGION 1..45: note = Description of Artificial Sequence: Synthetic polypeptide
GSMCMPCFTTDHQMARACDDCCGGRGRGRCYGPQCLCRGAGAAGG

SEQ ID NO: 170 - protein, 45 aa, synthetic construct
  REGION 1..45: note = Description of Artificial Sequence: Synthetic polypeptide
GSMCMPCFTTDHQMARRCDDCCGGRGRGRCYGPQCLCRGAGAAGG

SEQ ID NO: 171 - protein, 45 aa, synthetic construct
  REGION 1..45: note = Description of Artificial Sequence: Synthetic polypeptide
GSKCMPCFTTDHQMARRCDDCCGGRGRGRCYGPQCLCRGAGAAGG

SEQ ID NO: 172 - protein, 45 aa, synthetic construct
  REGION 1..45: note = Description of Artificial Sequence: Synthetic polypeptide
GSACAPCFTTDHQAARRCDDCCGGRGRGRCYGPQCLCRGAGAAGG

SEQ ID NO: 173 - protein, 45 aa, synthetic construct
  REGION 1..45: note = Description of Artificial Sequence: Synthetic polypeptide
GSKCAPCFTTDHQAARRCDDCCGGRGRGRCYGPQCLCRGAGAAGG

SEQ ID NO: 174 - protein, 45 aa, synthetic construct
  REGION 1..45: note = Description of Artificial Sequence: Synthetic polypeptide
  SITE 17: note = MOD_RES - Citrulline
  SITE 25: note = MOD_RES - Citrulline
GSMCMPCFTTDHQMARXCDDCCGGXGRGKCYGPQCLCRGAGAAGG

SEQ ID NO: 175 - protein, 45 aa, synthetic construct
  REGION 1..45: note = Description of Artificial Sequence: Synthetic polypeptide
  SITE 17: note = MOD_RES - Citrulline
  SITE 25: note = MOD_RES - Citrulline
  SITE 29: note = MOD_RES - Citrulline
GSMCMPCFTTDHQMARXCDDCCGGXGRGXCYGPQCLCRGAGAAGG

SEQ ID NO: 176 - protein, 45 aa, synthetic construct
  REGION 1..45: note = Description of Artificial Sequence: Synthetic polypeptide
  SITE 17: note = MOD_RES - Citrulline
  SITE 25: note = MOD_RES - Citrulline
  SITE 29: note = MOD_RES - Citrulline
GSKCMPCFTTDHQMARXCDDCCGGXGRGXCYGPQCLCRGAGAAGG

SEQ ID NO: 177 - protein, 45 aa, synthetic construct
  REGION 1..45: note = Description of Artificial Sequence: Synthetic polypeptide
  SITE 17: note = MOD_RES - Citrulline
  SITE 25: note = MOD_RES - Citrulline
GSACAPCFTTDHQAARXCDDCCGGXGRGKCYGPQCLCRGAGAAGG

SEQ ID NO: 178 - protein, 45 aa, synthetic construct
  REGION 1..45: note = Description of Artificial Sequence: Synthetic polypeptide
  SITE 17: note = MOD_RES - Citrulline
  SITE 25: note = MOD_RES - Citrulline
  SITE 29: note = MOD_RES - Citrulline
GSACAPCFTTDHQAARXCDDCCGGXGRGXCYGPQCLCRGAGAAGG

SEQ ID NO: 179 - protein, 45 aa, synthetic construct
  REGION 1..45: note = Description of Artificial Sequence: Synthetic polypeptide
  SITE 17: note = MOD_RES - Citrulline
  SITE 25: note = MOD_RES - Citrulline
  SITE 29: note = MOD_RES - Citrulline
GSKCAPCFTTDHQAARXCDDCCGGXGRGXCYGPQCLCRGAGAAGG

SEQ ID NO: 180 - protein, 38 aa, synthetic construct
  REGION 1..38: note = Description of Artificial Sequence: Synthetic polypeptide
GSMCMPCFTTDHQMVRKCDDCCGGKGRGKCYGPQCLCR

SEQ ID NO: 181 - protein, 38 aa, synthetic construct
  REGION 1..38: note = Description of Artificial Sequence: Synthetic polypeptide
GSMCMPCFTTDHQMVRVCDDCCGGKGRGKCYGPQCLCR

SEQ ID NO: 182 - protein, 38 aa, synthetic construct
  REGION 1..38: note = Description of Artificial Sequence: Synthetic polypeptide
GSMCMPCFTTDHQMVRRCDDCCGGKGRGKCYGPQCLCR

SEQ ID NO: 183 - protein, 38 aa, synthetic construct
  REGION 1..38: note = Description of Artificial Sequence: Synthetic polypeptide
GSMCMPCFTTDHQMVRKCDDCCGGVGRGKCYGPQCLCR

SEQ ID NO: 184 - protein, 38 aa, synthetic construct
  REGION 1..38: note = Description of Artificial Sequence: Synthetic polypeptide
GSMCMPCFTTDHQMVRVCDDCCGGVGRGKCYGPQCLCR

SEQ ID NO: 185 - protein, 38 aa, synthetic construct
  REGION 1..38: note = Description of Artificial Sequence: Synthetic polypeptide
GSMCMPCFTTDHQMVRRCDDCCGGVGRGKCYGPQCLCR

SEQ ID NO: 186 - protein, 38 aa, synthetic construct
  REGION 1..38: note = Description of Artificial Sequence: Synthetic polypeptide
GSMCMPCFTTDHQMVRKCDDCCGGRGRGKCYGPQCLCR

SEQ ID NO: 187 - protein, 38 aa, synthetic construct
  REGION 1..38: note = Description of Artificial Sequence: Synthetic polypeptide
GSMCMPCFTTDHQMVRVCDDCCGGRGRGKCYGPQCLCR

SEQ ID NO: 188 - protein, 38 aa, synthetic construct
  REGION 1..38: note = Description of Artificial Sequence: Synthetic polypeptide
GSMCMPCFTTDHQMVRRCDDCCGGRGRGKCYGPQCLCR

SEQ ID NO: 189 - protein, 38 aa, synthetic construct
  REGION 1..38: note = Description of Artificial Sequence: Synthetic polypeptide
GSMCMPCFTTDHQMVRKCDDCCGGKGRGVCYGPQCLCR

SEQ ID NO: 190 - protein, 38 aa, synthetic construct
  REGION 1..38: note = Description of Artificial Sequence: Synthetic polypeptide
GSMCMPCFTTDHQMVRVCDDCCGGKGRGVCYGPQCLCR

SEQ ID NO: 191 - protein, 38 aa, synthetic construct
  REGION 1..38: note = Description of Artificial Sequence: Synthetic polypeptide
GSMCMPCFTTDHQMVRRCDDCCGGKGRGVCYGPQCLCR

SEQ ID NO: 192 - protein, 38 aa, synthetic construct
  REGION 1..38: note = Description of Artificial Sequence: Synthetic polypeptide
GSMCMPCFTTDHQMVRKCDDCCGGVGRGVCYGPQCLCR

SEQ ID NO: 193 - protein, 38 aa, synthetic construct
  REGION 1..38: note = Description of Artificial Sequence: Synthetic polypeptide
GSMCMPCFTTDHQMVRVCDDCCGGVGRGVCYGPQCLCR

SEQ ID NO: 194 - protein, 38 aa, synthetic construct
  REGION 1..38: note = Description of Artificial Sequence: Synthetic polypeptide
GSMCMPCFTTDHQMVRRCDDCCGGVGRGVCYGPQCLCR

SEQ ID NO: 195 - protein, 38 aa, synthetic construct
  REGION 1..38: note = Description of Artificial Sequence: Synthetic polypeptide
GSMCMPCFTTDHQMVRKCDDCCGGRGRGVCYGPQCLCR

SEQ ID NO: 196 - protein, 38 aa, synthetic construct
  REGION 1..38: note = Description of Artificial Sequence: Synthetic polypeptide
GSMCMPCFTTDHQMVRVCDDCCGGRGRGVCYGPQCLCR

SEQ ID NO: 197 - protein, 38 aa, synthetic construct
  REGION 1..38: note = Description of Artificial Sequence: Synthetic polypeptide
GSMCMPCFTTDHQMVRRCDDCCGGRGRGVCYGPQCLCR

SEQ ID NO: 198 - protein, 38 aa, synthetic construct
  REGION 1..38: note = Description of Artificial Sequence: Synthetic polypeptide
GSMCMPCFTTDHQMVRKCDDCCGGKGRGRCYGPQCLCR

SEQ ID NO: 199 - protein, 38 aa, synthetic construct
  REGION 1..38: note = Description of Artificial Sequence: Synthetic polypeptide
GSMCMPCFTTDHQMVRVCDDCCGGKGRGRCYGPQCLCR

SEQ ID NO: 200 - protein, 38 aa, synthetic construct
  REGION 1..38: note = Description of Artificial Sequence: Synthetic polypeptide
GSMCMPCFTTDHQMVRRCDDCCGGKGRGRCYGPQCLCR

SEQ ID NO: 201 - protein, 38 aa, synthetic construct
  REGION 1..38: note = Description of Artificial Sequence: Synthetic polypeptide
GSMCMPCFTTDHQMVRKCDDCCGGVGRGRCYGPQCLCR

SEQ ID NO: 202 - protein, 38 aa, synthetic construct
  REGION 1..38: note = Description of Artificial Sequence: Synthetic polypeptide
GSMCMPCFTTDHQMVRVCDDCCGGVGRGRCYGPQCLCR

SEQ ID NO: 203 - protein, 38 aa, synthetic construct
  REGION 1..38: note = Description of Artificial Sequence: Synthetic polypeptide
GSMCMPCFTTDHQMVRRCDDCCGGVGRGRCYGPQCLCR

SEQ ID NO: 204 - protein, 38 aa, synthetic construct
  REGION 1..38: note = Description of Artificial Sequence: Synthetic polypeptide
GSMCMPCFTTDHQMVRKCDDCCGGRGRGRCYGPQCLCR

SEQ ID NO: 205 - protein, 38 aa, synthetic construct
  REGION 1..38: note = Description of Artificial Sequence: Synthetic polypeptide
GSMCMPCFTTDHQMVRVCDDCCGGRGRGRCYGPQCLCR

SEQ ID NO: 206 - protein, 38 aa, synthetic construct
  REGION 1..38: note = Description of Artificial Sequence: Synthetic polypeptide
GSMCMPCFTTDHQMVRRCDDCCGGRGRGRCYGPQCLCR

SEQ ID NO: 207 - protein, 38 aa, synthetic construct
  REGION 1..38: note = Description of Artificial Sequence: Synthetic polypeptide
GSKCMPCFTTDHQMVRRCDDCCGGRGRGRCYGPQCLCR

SEQ ID NO: 208 - protein, 38 aa, synthetic construct
  REGION 1..38: note = Description of Artificial Sequence: Synthetic polypeptide
GSVCVPCFTTDHQVVRRCDDCCGGRGRGRCYGPQCLCR

SEQ ID NO: 209 - protein, 38 aa, synthetic construct
  REGION 1..38: note = Description of Artificial Sequence: Synthetic polypeptide
GSKCVPCFTTDHQVVRRCDDCCGGRGRGRCYGPQCLCR

SEQ ID NO: 210 - protein, 38 aa, synthetic construct
  REGION 1..38: note = Description of Artificial Sequence: Synthetic polypeptide
  SITE 17: note = MOD_RES - Citrulline
  SITE 25: note = MOD_RES - Citrulline
GSMCMPCFTTDHQMVRXCDDCCGGXGRGKCYGPQCLCR

SEQ ID NO: 211 - protein, 38 aa, synthetic construct
  REGION 1..38: note = Description of Artificial Sequence: Synthetic polypeptide
  SITE 17: note = MOD_RES - Citrulline
  SITE 25: note = MOD_RES - Citrulline
  SITE 29: note = MOD_RES - Citrulline
GSMCMPCFTTDHQMVRXCDDCCGGXGRGXCYGPQCLCR

SEQ ID NO: 212 - protein, 38 aa, synthetic construct
  REGION 1..38: note = Description of Artificial Sequence: Synthetic polypeptide
  SITE 17: note = MOD_RES - Citrulline
  SITE 25: note = MOD_RES - Citrulline
  SITE 29: note = MOD_RES - Citrulline
GSKCMPCFTTDHQMVRXCDDCCGGXGRGXCYGPQCLCR

SEQ ID NO: 213 - protein, 38 aa, synthetic construct
  REGION 1..38: note = Description of Artificial Sequence: Synthetic polypeptide
  SITE 17: note = MOD_RES - Citrulline
  SITE 25: note = MOD_RES - Citrulline
GSVCVPCFTTDHQVVRXCDDCCGGXGRGKCYGPQCLCR

SEQ ID NO: 214 - protein, 38 aa, synthetic construct
  REGION 1..38: note = Description of Artificial Sequence: Synthetic polypeptide
  SITE 17: note = MOD_RES - Citrulline
  SITE 25: note = MOD_RES - Citrulline
  SITE 29: note = MOD_RES - Citrulline
GSVCVPCFTTDHQVVRXCDDCCGGXGRGXCYGPQCLCR

SEQ ID NO: 215 - protein, 38 aa, synthetic construct
  REGION 1..38: note = Description of Artificial Sequence: Synthetic polypeptide
  SITE 17: note = MOD_RES - Citrulline
  SITE 25: note = MOD_RES - Citrulline
  SITE 29: note = MOD_RES - Citrulline
GSKCVPCFTTDHQVVRXCDDCCGGXGRGXCYGPQCLCR

SEQ ID NO: 216 - protein, 45 aa, synthetic construct
  REGION 1..45: note = Description of Artificial Sequence: Synthetic polypeptide
GSMCMPCFTTDHQMVRKCDDCCGGKGRGKCYGPQCLCRGAGAAGG

SEQ ID NO: 217 - protein, 45 aa, synthetic construct
  REGION 1..45: note = Description of Artificial Sequence: Synthetic polypeptide
GSMCMPCFTTDHQMVRVCDDCCGGKGRGKCYGPQCLCRGAGAAGG

SEQ ID NO: 218 - protein, 45 aa, synthetic construct
  REGION 1..45: note = Description of Artificial Sequence: Synthetic polypeptide
GSMCMPCFTTDHQMVRRCDDCCGGKGRGKCYGPQCLCRGAGAAGG

SEQ ID NO: 219 - protein, 45 aa, synthetic construct
  REGION 1..45: note = Description of Artificial Sequence: Synthetic polypeptide
GSMCMPCFTTDHQMVRKCDDCCGGVGRGKCYGPQCLCRGAGAAGG

SEQ ID NO: 220 - protein, 45 aa, synthetic construct
  REGION 1..45: note = Description of Artificial Sequence: Synthetic polypeptide
GSMCMPCFTTDHQMVRVCDDCCGGVGRGKCYGPQCLCRGAGAAGG

SEQ ID NO: 221 - protein, 45 aa, synthetic construct
  REGION 1..45: note = Description of Artificial Sequence: Synthetic polypeptide
GSMCMPCFTTDHQMVRRCDDCCGGVGRGKCYGPQCLCRGAGAAGG

SEQ ID NO: 222 - protein, 45 aa, synthetic construct
  REGION 1..45: note = Description of Artificial Sequence: Synthetic polypeptide
GSMCMPCFTTDHQMVRKCDDCCGGRGRGKCYGPQCLCRGAGAAGG

SEQ ID NO: 223 - protein, 45 aa, synthetic construct
  REGION 1..45: note = Description of Artificial Sequence: Synthetic polypeptide
GSMCMPCFTTDHQMVRVCDDCCGGRGRGKCYGPQCLCRGAGAAGG

SEQ ID NO: 224 - protein, 45 aa, synthetic construct
  REGION 1..45: note = Description of Artificial Sequence: Synthetic polypeptide
GSMCMPCFTTDHQMVRRCDDCCGGRGRGKCYGPQCLCRGAGAAGG

SEQ ID NO: 225 - protein, 45 aa, synthetic construct
  REGION 1..45: note = Description of Artificial Sequence: Synthetic polypeptide
GSMCMPCFTTDHQMVRKCDDCCGGKGRGVCYGPQCLCRGAGAAGG

SEQ ID NO: 226 - protein, 45 aa, synthetic construct
  REGION 1..45: note = Description of Artificial Sequence: Synthetic polypeptide
GSMCMPCFTTDHQMVRVCDDCCGGKGRGVCYGPQCLCRGAGAAGG

SEQ ID NO: 227 - protein, 45 aa, synthetic construct
  REGION 1..45: note = Description of Artificial Sequence: Synthetic polypeptide
GSMCMPCFTTDHQMVRRCDDCCGGKGRGVCYGPQCLCRGAGAAGG

SEQ ID NO: 228 - protein, 45 aa, synthetic construct
  REGION 1..45: note = Description of Artificial Sequence: Synthetic polypeptide
GSMCMPCFTTDHQMVRKCDDCCGGVGRGVCYGPQCLCRGAGAAGG

SEQ ID NO: 229 - protein, 45 aa, synthetic construct
  REGION 1..45: note = Description of Artificial Sequence: Synthetic polypeptide
GSMCMPCFTTDHQMVRVCDDCCGGVGRGVCYGPQCLCRGAGAAGG

SEQ ID NO: 230 - protein, 45 aa, synthetic construct
  REGION 1..45: note = Description of Artificial Sequence: Synthetic polypeptide
GSMCMPCFTTDHQMVRRCDDCCGGVGRGVCYGPQCLCRGAGAAGG

SEQ ID NO: 231 - protein, 45 aa, synthetic construct
  REGION 1..45: note = Description of Artificial Sequence: Synthetic polypeptide
GSMCMPCFTTDHQMVRKCDDCCGGRGRGVCYGPQCLCRGAGAAGG

SEQ ID NO: 232 - protein, 45 aa, synthetic construct
  REGION 1..45: note = Description of Artificial Sequence: Synthetic polypeptide
GSMCMPCFTTDHQMVRVCDDCCGGRGRGVCYGPQCLCRGAGAAGG

SEQ ID NO: 233 - protein, 45 aa, synthetic construct
  REGION 1..45: note = Description of Artificial Sequence: Synthetic polypeptide
GSMCMPCFTTDHQMVRRCDDCCGGRGRGVCYGPQCLCRGAGAAGG

SEQ ID NO: 234 - protein, 45 aa, synthetic construct
  REGION 1..45: note = Description of Artificial Sequence: Synthetic polypeptide
GSMCMPCFTTDHQMVRKCDDCCGGKGRGRCYGPQCLCRGAGAAGG

SEQ ID NO: 235 - protein, 45 aa, synthetic construct
  REGION 1..45: note = Description of Artificial Sequence: Synthetic polypeptide
GSMCMPCFTTDHQMVRVCDDCCGGKGRGRCYGPQCLCRGAGAAGG

SEQ ID NO: 236 - protein, 45 aa, synthetic construct
  REGION 1..45: note = Description of Artificial Sequence: Synthetic polypeptide
GSMCMPCFTTDHQMVRRCDDCCGGKGRGRCYGPQCLCRGAGAAGG

SEQ ID NO: 237 - protein, 45 aa, synthetic construct
  REGION 1..45: note = Description of Artificial Sequence: Synthetic polypeptide
GSMCMPCFTTDHQMVRKCDDCCGGVGRGRCYGPQCLCRGAGAAGG

SEQ ID NO: 238 - protein, 45 aa, synthetic construct
  REGION 1..45: note = Description of Artificial Sequence: Synthetic polypeptide
GSMCMPCFTTDHQMVRVCDDCCGGVGRGRCYGPQCLCRGAGAAGG

SEQ ID NO: 239 - protein, 45 aa, synthetic construct
  REGION 1..45: note = Description of Artificial Sequence: Synthetic polypeptide
GSMCMPCFTTDHQMVRRCDDCCGGVGRGRCYGPQCLCRGAGAAGG

SEQ ID NO: 240 - protein, 45 aa, synthetic construct
  REGION 1..45: note = Description of Artificial Sequence: Synthetic polypeptide
GSMCMPCFTTDHQMVRKCDDCCGGRGRGRCYGPQCLCRGAGAAGG

SEQ ID NO: 241 - protein, 45 aa, synthetic construct
  REGION 1..45: note = Description of Artificial Sequence: Synthetic polypeptide
GSMCMPCFTTDHQMVRVCDDCCGGRGRGRCYGPQCLCRGAGAAGG

SEQ ID NO: 242 - protein, 45 aa, synthetic construct
  REGION 1..45: note = Description of Artificial Sequence: Synthetic polypeptide
GSMCMPCFTTDHQMVRRCDDCCGGRGRGRCYGPQCLCRGAGAAGG

SEQ ID NO: 243 - protein, 45 aa, synthetic construct
  REGION 1..45: note = Description of Artificial Sequence: Synthetic polypeptide
GSKCMPCFTTDHQMVRRCDDCCGGRGRGRCYGPQCLCRGAGAAGG

SEQ ID NO: 244 - protein, 45 aa, synthetic construct
  REGION 1..45: note = Description of Artificial Sequence: Synthetic polypeptide
GSVCVPCFTTDHQVVRRCDDCCGGRGRGRCYGPQCLCRGAGAAGG

SEQ ID NO: 245 - protein, 45 aa, synthetic construct
  REGION 1..45: note = Description of Artificial Sequence: Synthetic polypeptide
GSKCVPCFTTDHQVVRRCDDCCGGRGRGRCYGPQCLCRGAGAAGG

SEQ ID NO: 246 - protein, 45 aa, synthetic construct
  REGION 1..45: note = Description of Artificial Sequence: Synthetic polypeptide
  SITE 17: note = MOD_RES - Citrulline
  SITE 25: note = MOD_RES - Citrulline
GSMCMPCFTTDHQMVRXCDDCCGGXGRGKCYGPQCLCRGAGAAGG

SEQ ID NO: 247 - protein, 45 aa, synthetic construct
  REGION 1..45: note = Description of Artificial Sequence: Synthetic polypeptide
  SITE 17: note = MOD_RES - Citrulline
  SITE 25: note = MOD_RES - Citrulline
  SITE 29: note = MOD_RES - Citrulline
GSMCMPCFTTDHQMVRXCDDCCGGXGRGXCYGPQCLCRGAGAAGG

SEQ ID NO: 248 - protein, 45 aa, synthetic construct
  REGION 1..45: note = Description of Artificial Sequence: Synthetic polypeptide
  SITE 17: note = MOD_RES - Citrulline
  SITE 25: note = MOD_RES - Citrulline
  SITE 29: note = MOD_RES - Citrulline
GSKCMPCFTTDHQMVRXCDDCCGGXGRGXCYGPQCLCRGAGAAGG

SEQ ID NO: 249 - protein, 45 aa, synthetic construct
  REGION 1..45: note = Description of Artificial Sequence: Synthetic polypeptide
  SITE 17: note = MOD_RES - Citrulline
  SITE 25: note = MOD_RES - Citrulline
GSVCVPCFTTDHQVVRXCDDCCGGXGRGKCYGPQCLCRGAGAAGG

SEQ ID NO: 250 - protein, 45 aa, synthetic construct
  REGION 1..45: note = Description of Artificial Sequence: Synthetic polypeptide
  SITE 17: note = MOD_RES - Citrulline
  SITE 25: note = MOD_RES - Citrulline
  SITE 29: note = MOD_RES - Citrulline
GSVCVPCFTTDHQVVRXCDDCCGGXGRGXCYGPQCLCRGAGAAGG

SEQ ID NO: 251 - protein, 45 aa, synthetic construct
  REGION 1..45: note = Description of Artificial Sequence: Synthetic polypeptide
  SITE 17: note = MOD_RES - Citrulline
  SITE 25: note = MOD_RES - Citrulline
  SITE 29: note = MOD_RES - Citrulline
GSKCVPCFTTDHQVVRXCDDCCGGXGRGXCYGPQCLCRGAGAAGG

SEQ ID NO: 252 - protein, 38 aa, synthetic construct
  REGION 1..38: note = Description of Artificial Sequence: Synthetic polypeptide
GSMCMPCFTTDHQMLRKCDDCCGGKGRGKCYGPQCLCR

SEQ ID NO: 253 - protein, 38 aa, synthetic construct
  REGION 1..38: note = Description of Artificial Sequence: Synthetic polypeptide
GSMCMPCFTTDHQMLRLCDDCCGGKGRGKCYGPQCLCR

SEQ ID NO: 254 - protein, 38 aa, synthetic construct
  REGION 1..38: note = Description of Artificial Sequence: Synthetic polypeptide
GSMCMPCFTTDHQMLRRCDDCCGGKGRGKCYGPQCLCR

SEQ ID NO: 255 - protein, 38 aa, synthetic construct
  REGION 1..38: note = Description of Artificial Sequence: Synthetic polypeptide
GSMCMPCFTTDHQMLRKCDDCCGGLGRGKCYGPQCLCR

SEQ ID NO: 256 - protein, 38 aa, synthetic construct
  REGION 1..38: note = Description of Artificial Sequence: Synthetic polypeptide
GSMCMPCFTTDHQMLRLCDDCCGGLGRGKCYGPQCLCR

SEQ ID NO: 257 - protein, 38 aa, synthetic construct
  REGION 1..38: note = Description of Artificial Sequence: Synthetic polypeptide
GSMCMPCFTTDHQMLRRCDDCCGGLGRGKCYGPQCLCR

SEQ ID NO: 258 - protein, 38 aa, synthetic construct
  REGION 1..38: note = Description of Artificial Sequence: Synthetic polypeptide
GSMCMPCFTTDHQMLRKCDDCCGGRGRGKCYGPQCLCR

SEQ ID NO: 259 - protein, 38 aa, synthetic construct
  REGION 1..38: note = Description of Artificial Sequence: Synthetic polypeptide
GSMCMPCFTTDHQMLRLCDDCCGGRGRGKCYGPQCLCR

SEQ ID NO: 260 - protein, 38 aa, synthetic construct
  REGION 1..38: note = Description of Artificial Sequence: Synthetic polypeptide
GSMCMPCFTTDHQMLRRCDDCCGGRGRGKCYGPQCLCR

SEQ ID NO: 261 - protein, 38 aa, synthetic construct
  REGION 1..38: note = Description of Artificial Sequence: Synthetic polypeptide
GSMCMPCFTTDHQMLRKCDDCCGGKGRGLCYGPQCLCR

SEQ ID NO: 262 - protein, 38 aa, synthetic construct
  REGION 1..38: note = Description of Artificial Sequence: Synthetic polypeptide
GSMCMPCFTTDHQMLRLCDDCCGGKGRGLCYGPQCLCR

SEQ ID NO: 263 - protein, 38 aa, synthetic construct
  REGION 1..38: note = Description of Artificial Sequence: Synthetic polypeptide
GSMCMPCFTTDHQMLRRCDDCCGGKGRGLCYGPQCLCR

SEQ ID NO: 264 - protein, 38 aa, synthetic construct
  REGION 1..38: note = Description of Artificial Sequence: Synthetic polypeptide
GSMCMPCFTTDHQMLRKCDDCCGGLGRGLCYGPQCLCR

SEQ ID NO: 265 - protein, 38 aa, synthetic construct
  REGION 1..38: note = Description of Artificial Sequence: Synthetic polypeptide
GSMCMPCFTTDHQMLRLCDDCCGGLGRGLCYGPQCLCR

SEQ ID NO: 266 - protein, 38 aa, synthetic construct
  REGION 1..38: note = Description of Artificial Sequence: Synthetic polypeptide
GSMCMPCFTTDHQMLRRCDDCCGGLGRGLCYGPQCLCR

SEQ ID NO: 267 - protein, 38 aa, synthetic construct
  REGION 1..38: note = Description of Artificial Sequence: Synthetic polypeptide
GSMCMPCFTTDHQMLRKCDDCCGGRGRGLCYGPQCLCR

SEQ ID NO: 268 - protein, 38 aa, synthetic construct
  REGION 1..38: note = Description of Artificial Sequence: Synthetic polypeptide
GSMCMPCFTTDHQMLRLCDDCCGGRGRGLCYGPQCLCR

SEQ ID NO: 269 - protein, 38 aa, synthetic construct
  REGION 1..38: note = Description of Artificial Sequence: Synthetic polypeptide
GSMCMPCFTTDHQMLRRCDDCCGGRGRGLCYGPQCLCR

SEQ ID NO: 270 - protein, 38 aa, synthetic construct
  REGION 1..38: note = Description of Artificial Sequence: Synthetic polypeptide
GSMCMPCFTTDHQMLRKCDDCCGGKGRGRCYGPQCLCR

SEQ ID NO: 271 - protein, 38 aa, synthetic construct
  REGION 1..38: note = Description of Artificial Sequence: Synthetic polypeptide
GSMCMPCFTTDHQMLRLCDDCCGGKGRGRCYGPQCLCR

SEQ ID NO: 272 - protein, 38 aa, synthetic construct
  REGION 1..38: note = Description of Artificial Sequence: Synthetic polypeptide
GSMCMPCFTTDHQMLRRCDDCCGGKGRGRCYGPQCLCR

SEQ ID NO: 273 - protein, 38 aa, synthetic construct
  REGION 1..38: note = Description of Artificial Sequence: Synthetic polypeptide
GSMCMPCFTTDHQMLRKCDDCCGGLGRGRCYGPQCLCR

SEQ ID NO: 274 - protein, 38 aa, synthetic construct
  REGION 1..38: note = Description of Artificial Sequence: Synthetic polypeptide
GSMCMPCFTTDHQMLRLCDDCCGGLGRGRCYGPQCLCR

SEQ ID NO: 275 - protein, 38 aa, synthetic construct
  REGION 1..38: note = Description of Artificial Sequence: Synthetic polypeptide
GSMCMPCFTTDHQMLRRCDDCCGGLGRGRCYGPQCLCR

SEQ ID NO: 276 - protein, 38 aa, synthetic construct
  REGION 1..38: note = Description of Artificial Sequence: Synthetic polypeptide
GSMCMPCFTTDHQMLRKCDDCCGGRGRGRCYGPQCLCR

SEQ ID NO: 277 - protein, 38 aa, synthetic construct
  REGION 1..38: note = Description of Artificial Sequence: Synthetic polypeptide
GSMCMPCFTTDHQMLRLCDDCCGGRGRGRCYGPQCLCR

SEQ ID NO: 278 - protein, 38 aa, synthetic construct
  REGION 1..38: note = Description of Artificial Sequence: Synthetic polypeptide
GSMCMPCFTTDHQMLRRCDDCCGGRGRGRCYGPQCLCR

SEQ ID NO: 279 - protein, 38 aa, synthetic construct
  REGION 1..38: note = Description of Artificial Sequence: Synthetic polypeptide
GSKCMPCFTTDHQMLRRCDDCCGGRGRGRCYGPQCLCR

SEQ ID NO: 280 - protein, 38 aa, synthetic construct
  REGION 1..38: note = Description of Artificial Sequence: Synthetic polypeptide
GSLCLPCFTTDHQLLRRCDDCCGGRGRGRCYGPQCLCR

SEQ ID NO: 281 - protein, 38 aa, synthetic construct
  REGION 1..38: note = Description of Artificial Sequence: Synthetic polypeptide
GSKCLPCFTTDHQLLRRCDDCCGGRGRGRCYGPQCLCR

SEQ ID NO: 282 - protein, 38 aa, synthetic construct
  REGION 1..38: note = Description of Artificial Sequence: Synthetic polypeptide
  SITE 17: note = MOD_RES - Citrulline
  SITE 25: note = MOD_RES - Citrulline
GSMCMPCFTTDHQMLRXCDDCCGGXGRGKCYGPQCLCR

SEQ ID NO: 283 - protein, 38 aa, synthetic construct
  REGION 1..38: note = Description of Artificial Sequence: Synthetic polypeptide
  SITE 17: note = MOD_RES - Citrulline
  SITE 25: note = MOD_RES - Citrulline
  SITE 29: note = MOD_RES - Citrulline
GSMCMPCFTTDHQMLRXCDDCCGGXGRGXCYGPQCLCR

SEQ ID NO: 284 - protein, 38 aa, synthetic construct
  REGION 1..38: note = Description of Artificial Sequence: Synthetic polypeptide
  SITE 17: note = MOD_RES - Citrulline
  SITE 25: note = MOD_RES - Citrulline
  SITE 29: note = MOD_RES - Citrulline
GSKCMPCFTTDHQMLRXCDDCCGGXGRGXCYGPQCLCR

SEQ ID NO: 285 - protein, 38 aa, synthetic construct
  REGION 1..38: note = Description of Artificial Sequence: Synthetic polypeptide
  SITE 17: note = MOD_RES - Citrulline
  SITE 25: note = MOD_RES - Citrulline
GSLCLPCFTTDHQLLRXCDDCCGGXGRGKCYGPQCLCR

SEQ ID NO: 286 - protein, 38 aa, synthetic construct
  REGION 1..38: note = Description of Artificial Sequence: Synthetic polypeptide
  SITE 17: note = MOD_RES - Citrulline
  SITE 25: note = MOD_RES - Citrulline
  SITE 29: note = MOD_RES - Citrulline
GSLCLPCFTTDHQLLRXCDDCCGGXGRGXCYGPQCLCR

SEQ ID NO: 287 - protein, 38 aa, synthetic construct
  REGION 1..38: note = Description of Artificial Sequence: Synthetic polypeptide
  SITE 17: note = MOD_RES - Citrulline
  SITE 25: note = MOD_RES - Citrulline
  SITE 29: note = MOD_RES - Citrulline
GSKCLPCFTTDHQLLRXCDDCCGGXGRGXCYGPQCLCR

SEQ ID NO: 288 - protein, 45 aa, synthetic construct
  REGION 1..45: note = Description of Artificial Sequence: Synthetic polypeptide
GSMCMPCFTTDHQMLRKCDDCCGGKGRGKCYGPQCLCRGAGAAGG

SEQ ID NO: 289 - protein, 45 aa, synthetic construct
  REGION 1..45: note = Description of Artificial Sequence: Synthetic polypeptide
GSMCMPCFTTDHQMLRLCDDCCGGKGRGKCYGPQCLCRGAGAAGG

SEQ ID NO: 290 - protein, 45 aa, synthetic construct
  REGION 1..45: note = Description of Artificial Sequence: Synthetic polypeptide
GSMCMPCFTTDHQMLRRCDDCCGGKGRGKCYGPQCLCRGAGAAGG

SEQ ID NO: 291 - protein, 45 aa, synthetic construct
  REGION 1..45: note = Description of Artificial Sequence: Synthetic polypeptide
GSMCMPCFTTDHQMLRKCDDCCGGLGRGKCYGPQCLCRGAGAAGG

SEQ ID NO: 292 - protein, 45 aa, synthetic construct
  REGION 1..45: note = Description of Artificial Sequence: Synthetic polypeptide
GSMCMPCFTTDHQMLRLCDDCCGGLGRGKCYGPQCLCRGAGAAGG

SEQ ID NO: 293 - protein, 45 aa, synthetic construct
  REGION 1..45: note = Description of Artificial Sequence: Synthetic polypeptide
GSMCMPCFTTDHQMLRRCDDCCGGLGRGKCYGPQCLCRGAGAAGG

SEQ ID NO: 294 - protein, 45 aa, synthetic construct
  REGION 1..45: note = Description of Artificial Sequence: Synthetic polypeptide
GSMCMPCFTTDHQMLRKCDDCCGGRGRGKCYGPQCLCRGAGAAGG

SEQ ID NO: 295 - protein, 45 aa, synthetic construct
  REGION 1..45: note = Description of Artificial Sequence: Synthetic polypeptide
GSMCMPCFTTDHQMLRLCDDCCGGRGRGKCYGPQCLCRGAGAAGG

SEQ ID NO: 296 - protein, 45 aa, synthetic construct
  REGION 1..45: note = Description of Artificial Sequence: Synthetic polypeptide
GSMCMPCFTTDHQMLRRCDDCCGGRGRGKCYGPQCLCRGAGAAGG

SEQ ID NO: 297 - protein, 45 aa, synthetic construct
  REGION 1..45: note = Description of Artificial Sequence: Synthetic polypeptide
GSMCMPCFTTDHQMLRKCDDCCGGKGRGLCYGPQCLCRGAGAAGG

SEQ ID NO: 298 - protein, 45 aa, synthetic construct
  REGION 1..45: note = Description of Artificial Sequence: Synthetic polypeptide
GSMCMPCFTTDHQMLRLCDDCCGGKGRGLCYGPQCLCRGAGAAGG

SEQ ID NO: 299 - protein, 45 aa, synthetic construct
  REGION 1..45: note = Description of Artificial Sequence: Synthetic polypeptide
GSMCMPCFTTDHQMLRRCDDCCGGKGRGLCYGPQCLCRGAGAAGG

SEQ ID NO: 300 - protein, 45 aa, synthetic construct
  REGION 1..45: note = Description of Artificial Sequence: Synthetic polypeptide
GSMCMPCFTTDHQMLRKCDDCCGGLGRGLCYGPQCLCRGAGAAGG

SEQ ID NO: 301 - protein, 45 aa, synthetic construct
  REGION 1..45: note = Description of Artificial Sequence: Synthetic polypeptide
GSMCMPCFTTDHQMLRLCDDCCGGLGRGLCYGPQCLCRGAGAAGG

SEQ ID NO: 302 - protein, 45 aa, synthetic construct
  REGION 1..45: note = Description of Artificial Sequence: Synthetic polypeptide
GSMCMPCFTTDHQMLRRCDDCCGGLGRGLCYGPQCLCRGAGAAGG

SEQ ID NO: 303 - protein, 45 aa, synthetic construct
  REGION 1..45: note = Description of Artificial Sequence: Synthetic polypeptide
GSMCMPCFTTDHQMLRKCDDCCGGRGRGLCYGPQCLCRGAGAAGG

SEQ ID NO: 304 - protein, 45 aa, synthetic construct
  REGION 1..45: note = Description of Artificial Sequence: Synthetic polypeptide
GSMCMPCFTTDHQMLRLCDDCCGGRGRGLCYGPQCLCRGAGAAGG

SEQ ID NO: 305 - protein, 45 aa, synthetic construct
  REGION 1..45: note = Description of Artificial Sequence: Synthetic polypeptide
GSMCMPCFTTDHQMLRRCDDCCGGRGRGLCYGPQCLCRGAGAAGG

SEQ ID NO: 306 - protein, 45 aa, synthetic construct
  REGION 1..45: note = Description of Artificial Sequence: Synthetic polypeptide
GSMCMPCFTTDHQMLRKCDDCCGGKGRGRCYGPQCLCRGAGAAGG

SEQ ID NO: 307 - protein, 45 aa, synthetic construct
  REGION 1..45: note = Description of Artificial Sequence: Synthetic polypeptide
GSMCMPCFTTDHQMLRLCDDCCGGKGRGRCYGPQCLCRGAGAAGG

SEQ ID NO: 308 - protein, 45 aa, synthetic construct
  REGION 1..45: note = Description of Artificial Sequence: Synthetic polypeptide
GSMCMPCFTTDHQMLRRCDDCCGGKGRGRCYGPQCLCRGAGAAGG

SEQ ID NO: 309 - protein, 45 aa, synthetic construct
  REGION 1..45: note = Description of Artificial Sequence: Synthetic polypeptide
GSMCMPCFTTDHQMLRKCDDCCGGLGRGRCYGPQCLCRGAGAAGG

SEQ ID NO: 310 - protein, 45 aa, synthetic construct
  REGION 1..45: note = Description of Artificial Sequence: Synthetic polypeptide
GSMCMPCFTTDHQMLRLCDDCCGGLGRGRCYGPQCLCRGAGAAGG

SEQ ID NO: 311 - protein, 45 aa, synthetic construct
  REGION 1..45: note = Description of Artificial Sequence: Synthetic polypeptide
GSMCMPCFTTDHQMLRRCDDCCGGLGRGRCYGPQCLCRGAGAAGG

SEQ ID NO: 312 - protein, 45 aa, synthetic construct
  REGION 1..45: note = Description of Artificial Sequence: Synthetic polypeptide
GSMCMPCFTTDHQMLRKCDDCCGGRGRGRCYGPQCLCRGAGAAGG

SEQ ID NO: 313 - protein, 45 aa, synthetic construct
  REGION 1..45: note = Description of Artificial Sequence: Synthetic polypeptide
GSMCMPCFTTDHQMLRLCDDCCGGRGRGRCYGPQCLCRGAGAAGG

SEQ ID NO: 314 - protein, 45 aa, synthetic construct
  REGION 1..45: note = Description of Artificial Sequence: Synthetic polypeptide
GSMCMPCFTTDHQMLRRCDDCCGGRGRGRCYGPQCLCRGAGAAGG

SEQ ID NO: 315 - protein, 45 aa, synthetic construct
  REGION 1..45: note = Description of Artificial Sequence: Synthetic polypeptide
GSKCMPCFTTDHQMLRRCDDCCGGRGRGRCYGPQCLCRGAGAAGG

SEQ ID NO: 316 - protein, 45 aa, synthetic construct
  REGION 1..45: note = Description of Artificial Sequence: Synthetic polypeptide
GSLCLPCFTTDHQLLRRCDDCCGGRGRGRCYGPQCLCRGAGAAGG

SEQ ID NO: 317 - protein, 45 aa, synthetic construct
  REGION 1..45: note = Description of Artificial Sequence: Synthetic polypeptide
GSKCLPCFTTDHQLLRRCDDCCGGRGRGRCYGPQCLCRGAGAAGG

SEQ ID NO: 318 - protein, 45 aa, synthetic construct
  REGION 1..45: note = Description of Artificial Sequence: Synthetic polypeptide
  SITE 17: note = MOD_RES - Citrulline
  SITE 25: note = MOD_RES - Citrulline
GSMCMPCFTTDHQMLRXCDDCCGGXGRGKCYGPQCLCRGAGAAGG

SEQ ID NO: 319 - protein, 45 aa, synthetic construct
  REGION 1..45: note = Description of Artificial Sequence: Synthetic polypeptide
  SITE 17: note = MOD_RES - Citrulline
  SITE 25: note = MOD_RES - Citrulline
  SITE 29: note = MOD_RES - Citrulline
GSMCMPCFTTDHQMLRXCDDCCGGXGRGXCYGPQCLCRGAGAAGG

SEQ ID NO: 320 - protein, 45 aa, synthetic construct
  REGION 1..45: note = Description of Artificial Sequence: Synthetic polypeptide
  SITE 17: note = MOD_RES - Citrulline
  SITE 25: note = MOD_RES - Citrulline
  SITE 29: note = MOD_RES - Citrulline
GSKCMPCFTTDHQMLRXCDDCCGGXGRGXCYGPQCLCRGAGAAGG

SEQ ID NO: 321 - protein, 45 aa, synthetic construct
  REGION 1..45: note = Description of Artificial Sequence: Synthetic polypeptide
  SITE 17: note = MOD_RES - Citrulline
  SITE 25: note = MOD_RES - Citrulline
GSLCLPCFTTDHQLLRXCDDCCGGXGRGKCYGPQCLCRGAGAAGG

SEQ ID NO: 322 - protein, 45 aa, synthetic construct
  REGION 1..45: note = Description of Artificial Sequence: Synthetic polypeptide
  SITE 17: note = MOD_RES - Citrulline
  SITE 25: note = MOD_RES - Citrulline
  SITE 29: note = MOD_RES - Citrulline
GSLCLPCFTTDHQLLRXCDDCCGGXGRGXCYGPQCLCRGAGAAGG

SEQ ID NO: 323 - protein, 45 aa, synthetic construct
  REGION 1..45: note = Description of Artificial Sequence: Synthetic polypeptide
  SITE 17: note = MOD_RES - Citrulline
  SITE 25: note = MOD_RES - Citrulline
  SITE 29: note = MOD_RES - Citrulline
GSKCLPCFTTDHQLLRXCDDCCGGXGRGXCYGPQCLCRGAGAAGG

SEQ ID NO: 324 - protein, 38 aa, synthetic construct
  REGION 1..38: note = Description of Artificial Sequence: Synthetic polypeptide
GSGCGPCFTTDHQGARKCDDCCGGKGRGKCYGPQCLCR

SEQ ID NO: 325 - protein, 38 aa, synthetic construct
  REGION 1..38: note = Description of Artificial Sequence: Synthetic polypeptide
GSGCGPCFTTDHQGARACDDCCGGKGRGKCYGPQCLCR

SEQ ID NO: 326 - protein, 38 aa, synthetic construct
  REGION 1..38: note = Description of Artificial Sequence: Synthetic polypeptide
GSGCGPCFTTDHQGARRCDDCCGGKGRGKCYGPQCLCR

SEQ ID NO: 327 - protein, 38 aa, synthetic construct
  REGION 1..38: note = Description of Artificial Sequence: Synthetic polypeptide
GSGCGPCFTTDHQGARKCDDCCGGAGRGKCYGPQCLCR

SEQ ID NO: 328 - protein, 38 aa, synthetic construct
  REGION 1..38: note = Description of Artificial Sequence: Synthetic polypeptide
GSGCGPCFTTDHQGARACDDCCGGAGRGKCYGPQCLCR

SEQ ID NO: 329 - protein, 38 aa, synthetic construct
  REGION 1..38: note = Description of Artificial Sequence: Synthetic polypeptide
GSGCGPCFTTDHQGARRCDDCCGGAGRGKCYGPQCLCR

SEQ ID NO: 330 - protein, 38 aa, synthetic construct
  REGION 1..38: note = Description of Artificial Sequence: Synthetic polypeptide
GSGCGPCFTTDHQGARKCDDCCGGRGRGKCYGPQCLCR

SEQ ID NO: 331 - protein, 38 aa, synthetic construct
  REGION 1..38: note = Description of Artificial Sequence: Synthetic polypeptide
GSGCGPCFTTDHQGARACDDCCGGRGRGKCYGPQCLCR

SEQ ID NO: 332 - protein, 38 aa, synthetic construct
  REGION 1..38: note = Description of Artificial Sequence: Synthetic polypeptide
GSGCGPCFTTDHQGARRCDDCCGGRGRGKCYGPQCLCR

SEQ ID NO: 333 - protein, 38 aa, synthetic construct
  REGION 1..38: note = Description of Artificial Sequence: Synthetic polypeptide
GSGCGPCFTTDHQGARKCDDCCGGKGRGACYGPQCLCR

SEQ ID NO: 334 - protein, 38 aa, synthetic construct
  REGION 1..38: note = Description of Artificial Sequence: Synthetic polypeptide
GSGCGPCFTTDHQGARACDDCCGGKGRGACYGPQCLCR

SEQ ID NO: 335 - protein, 38 aa, synthetic construct
  REGION 1..38: note = Description of Artificial Sequence: Synthetic polypeptide
GSGCGPCFTTDHQGARRCDDCCGGKGRGACYGPQCLCR

SEQ ID NO: 336 - protein, 38 aa, synthetic construct
  REGION 1..38: note = Description of Artificial Sequence: Synthetic polypeptide
GSGCGPCFTTDHQGARKCDDCCGGAGRGACYGPQCLCR

SEQ ID NO: 337 - protein, 38 aa, synthetic construct
  REGION 1..38: note = Description of Artificial Sequence: Synthetic polypeptide
GSGCGPCFTTDHQGARACDDCCGGAGRGACYGPQCLCR

SEQ ID NO: 338 - protein, 38 aa, synthetic construct
  REGION 1..38: note = Description of Artificial Sequence: Synthetic polypeptide
GSGCGPCFTTDHQGARRCDDCCGGAGRGACYGPQCLCR

SEQ ID NO: 339 - protein, 38 aa, synthetic construct
  REGION 1..38: note = Description of Artificial Sequence: Synthetic polypeptide
GSGCGPCFTTDHQGARKCDDCCGGRGRGACYGPQCLCR

SEQ ID NO: 340 - protein, 38 aa, synthetic construct
  REGION 1..38: note = Description of Artificial Sequence: Synthetic polypeptide
GSGCGPCFTTDHQGARACDDCCGGRGRGACYGPQCLCR

SEQ ID NO: 341 - protein, 38 aa, synthetic construct
  REGION 1..38: note = Description of Artificial Sequence: Synthetic polypeptide
GSGCGPCFTTDHQGARRCDDCCGGRGRGACYGPQCLCR

SEQ ID NO: 342 - protein, 38 aa, synthetic construct
  REGION 1..38: note = Description of Artificial Sequence: Synthetic polypeptide
GSGCGPCFTTDHQGARKCDDCCGGKGRGRCYGPQCLCR

SEQ ID NO: 343 - protein, 38 aa, synthetic construct
  REGION 1..38: note = Description of Artificial Sequence: Synthetic polypeptide
GSGCGPCFTTDHQGARACDDCCGGKGRGRCYGPQCLCR

SEQ ID NO: 344 - protein, 38 aa, synthetic construct
  REGION 1..38: note = Description of Artificial Sequence: Synthetic polypeptide
GSGCGPCFTTDHQGARRCDDCCGGKGRGRCYGPQCLCR

SEQ ID NO: 345 - protein, 38 aa, synthetic construct
  REGION 1..38: note = Description of Artificial Sequence: Synthetic polypeptide
GSGCGPCFTTDHQGARKCDDCCGGAGRGRCYGPQCLCR

SEQ ID NO: 346 - protein, 38 aa, synthetic construct
  REGION 1..38: note = Description of Artificial Sequence: Synthetic polypeptide
GSGCGPCFTTDHQGARACDDCCGGAGRGRCYGPQCLCR

SEQ ID NO: 347 - protein, 38 aa, synthetic construct
  REGION 1..38: note = Description of Artificial Sequence: Synthetic polypeptide
GSGCGPCFTTDHQGARRCDDCCGGAGRGRCYGPQCLCR

SEQ ID NO: 348 - protein, 38 aa, synthetic construct
  REGION 1..38: note = Description of Artificial Sequence: Synthetic polypeptide
GSGCGPCFTTDHQGARKCDDCCGGRGRGRCYGPQCLCR

SEQ ID NO: 349 - protein, 38 aa, synthetic construct
  REGION 1..38: note = Description of Artificial Sequence: Synthetic polypeptide
GSGCGPCFTTDHQGARACDDCCGGRGRGRCYGPQCLCR

SEQ ID NO: 350 - protein, 38 aa, synthetic construct
  REGION 1..38: note = Description of Artificial Sequence: Synthetic polypeptide
GSGCGPCFTTDHQGARRCDDCCGGRGRGRCYGPQCLCR

SEQ ID NO: 351 - protein, 38 aa, synthetic construct
  REGION 1..38: note = Description of Artificial Sequence: Synthetic polypeptide
GSKCGPCFTTDHQGARRCDDCCGGRGRGRCYGPQCLCR

SEQ ID NO: 352 - protein, 38 aa, synthetic construct
  REGION 1..38: note = Description of Artificial Sequence: Synthetic polypeptide
  SITE 17: note = MOD_RES - Citrulline
  SITE 25: note = MOD_RES - Citrulline
GSGCGPCFTTDHQGARXCDDCCGGXGRGKCYGPQCLCR

SEQ ID NO: 353 - protein, 38 aa, synthetic construct
  REGION 1..38: note = Description of Artificial Sequence: Synthetic polypeptide
  SITE 17: note = MOD_RES - Citrulline
  SITE 25: note = MOD_RES - Citrulline
  SITE 29: note = MOD_RES - Citrulline
GSGCGPCFTTDHQGARXCDDCCGGXGRGXCYGPQCLCR

SEQ ID NO: 354 - protein, 38 aa, synthetic construct
  REGION 1..38: note = Description of Artificial Sequence: Synthetic polypeptide
  SITE 17: note = MOD_RES - Citrulline
  SITE 25: note = MOD_RES - Citrulline
  SITE 29: note = MOD_RES - Citrulline
GSKCGPCFTTDHQGARXCDDCCGGXGRGXCYGPQCLCR

SEQ ID NO: 355 - protein, 38 aa, synthetic construct
  REGION 1..38: note = Description of Artificial Sequence: Synthetic polypeptide
GSACAPCFTTDHQAARACDDCCGGKGRGKCYGPQCLCR

SEQ ID NO: 356 - protein, 38 aa, synthetic construct
  REGION 1..38: note = Description of Artificial Sequence: Synthetic polypeptide
GSACAPCFTTDHQAARRCDDCCGGKGRGKCYGPQCLCR

SEQ ID NO: 357 - protein, 38 aa, synthetic construct
  REGION 1..38: note = Description of Artificial Sequence: Synthetic polypeptide
GSACAPCFTTDHQAARKCDDCCGGAGRGKCYGPQCLCR

SEQ ID NO: 358 - protein, 38 aa, synthetic construct
  REGION 1..38: note = Description of Artificial Sequence: Synthetic polypeptide
GSACAPCFTTDHQAARACDDCCGGAGRGKCYGPQCLCR

SEQ ID NO: 359 - protein, 38 aa, synthetic construct
  REGION 1..38: note = Description of Artificial Sequence: Synthetic polypeptide
GSACAPCFTTDHQAARRCDDCCGGAGRGKCYGPQCLCR

SEQ ID NO: 360 - protein, 38 aa, synthetic construct
  REGION 1..38: note = Description of Artificial Sequence: Synthetic polypeptide
GSACAPCFTTDHQAARKCDDCCGGRGRGKCYGPQCLCR

SEQ ID NO: 361 - protein, 38 aa, synthetic construct
  REGION 1..38: note = Description of Artificial Sequence: Synthetic polypeptide
GSACAPCFTTDHQAARACDDCCGGRGRGKCYGPQCLCR

SEQ ID NO: 362 - protein, 38 aa, synthetic construct
  REGION 1..38: note = Description of Artificial Sequence: Synthetic polypeptide
GSACAPCFTTDHQAARKCDDCCGGKGRGACYGPQCLCR

SEQ ID NO: 363 - protein, 38 aa, synthetic construct
  REGION 1..38: note = Description of Artificial Sequence: Synthetic polypeptide
GSACAPCFTTDHQAARACDDCCGGKGRGACYGPQCLCR

SEQ ID NO: 364 - protein, 38 aa, synthetic construct
  REGION 1..38: note = Description of Artificial Sequence: Synthetic polypeptide
GSACAPCFTTDHQAARRCDDCCGGKGRGACYGPQCLCR

SEQ ID NO: 365 - protein, 38 aa, synthetic construct
  REGION 1..38: note = Description of Artificial Sequence: Synthetic polypeptide
GSACAPCFTTDHQAARKCDDCCGGAGRGACYGPQCLCR

SEQ ID NO: 366 - protein, 38 aa, synthetic construct
  REGION 1..38: note = Description of Artificial Sequence: Synthetic polypeptide
GSACAPCFTTDHQAARACDDCCGGAGRGACYGPQCLCR

SEQ ID NO: 367 - protein, 38 aa, synthetic construct
  REGION 1..38: note = Description of Artificial Sequence: Synthetic polypeptide
GSACAPCFTTDHQAARRCDDCCGGAGRGACYGPQCLCR

SEQ ID NO: 368 - protein, 38 aa, synthetic construct
  REGION 1..38: note = Description of Artificial Sequence: Synthetic polypeptide
GSACAPCFTTDHQAARKCDDCCGGRGRGACYGPQCLCR

SEQ ID NO: 369 - protein, 38 aa, synthetic construct
  REGION 1..38: note = Description of Artificial Sequence: Synthetic polypeptide
GSACAPCFTTDHQAARACDDCCGGRGRGACYGPQCLCR

SEQ ID NO: 370 - protein, 38 aa, synthetic construct
  REGION 1..38: note = Description of Artificial Sequence: Synthetic polypeptide
GSACAPCFTTDHQAARRCDDCCGGRGRGACYGPQCLCR

SEQ ID NO: 371 - protein, 38 aa, synthetic construct
  REGION 1..38: note = Description of Artificial Sequence: Synthetic polypeptide
GSACAPCFTTDHQAARKCDDCCGGKGRGRCYGPQCLCR

SEQ ID NO: 372 - protein, 38 aa, synthetic construct
  REGION 1..38: note = Description of Artificial Sequence: Synthetic polypeptide
GSACAPCFTTDHQAARACDDCCGGKGRGRCYGPQCLCR

SEQ ID NO: 373 - protein, 38 aa, synthetic construct
  REGION 1..38: note = Description of Artificial Sequence: Synthetic polypeptide
GSACAPCFTTDHQAARRCDDCCGGKGRGRCYGPQCLCR

SEQ ID NO: 374 - protein, 38 aa, synthetic construct
  REGION 1..38: note = Description of Artificial Sequence: Synthetic polypeptide
GSACAPCFTTDHQAARKCDDCCGGAGRGRCYGPQCLCR

SEQ ID NO: 375 - protein, 38 aa, synthetic construct
  REGION 1..38: note = Description of Artificial Sequence: Synthetic polypeptide
GSACAPCFTTDHQAARACDDCCGGAGRGRCYGPQCLCR

SEQ ID NO: 376 - protein, 38 aa, synthetic construct
  REGION 1..38: note = Description of Artificial Sequence: Synthetic polypeptide
GSACAPCFTTDHQAARRCDDCCGGAGRGRCYGPQCLCR

SEQ ID NO: 377 - protein, 38 aa, synthetic construct
  REGION 1..38: note = Description of Artificial Sequence: Synthetic polypeptide
GSACAPCFTTDHQAARKCDDCCGGRGRGRCYGPQCLCR

SEQ ID NO: 378 - protein, 38 aa, synthetic construct
  REGION 1..38: note = Description of Artificial Sequence: Synthetic polypeptide
GSACAPCFTTDHQAARACDDCCGGRGRGRCYGPQCLCR

SEQ ID NO: 379 - protein, 38 aa, synthetic construct
  REGION 1..38: note = Description of Artificial Sequence: Synthetic polypeptide
GSICIPCFTTDHQIARKCDDCCGGKGRGKCYGPQCLCR

SEQ ID NO: 380 - protein, 38 aa, synthetic construct
  REGION 1..38: note = Description of Artificial Sequence: Synthetic polypeptide
GSICIPCFTTDHQIARACDDCCGGKGRGKCYGPQCLCR

SEQ ID NO: 381 - protein, 38 aa, synthetic construct
  REGION 1..38: note = Description of Artificial Sequence: Synthetic polypeptide
GSICIPCFTTDHQIARRCDDCCGGKGRGKCYGPQCLCR

SEQ ID NO: 382 - protein, 38 aa, synthetic construct
  REGION 1..38: note = Description of Artificial Sequence: Synthetic polypeptide
GSICIPCFTTDHQIARKCDDCCGGAGRGKCYGPQCLCR

SEQ ID NO: 383 - protein, 38 aa, synthetic construct
  REGION 1..38: note = Description of Artificial Sequence: Synthetic polypeptide
GSICIPCFTTDHQIARACDDCCGGAGRGKCYGPQCLCR

SEQ ID NO: 384 - protein, 38 aa, synthetic construct
  REGION 1..38: note = Description of Artificial Sequence: Synthetic polypeptide
GSICIPCFTTDHQIARRCDDCCGGAGRGKCYGPQCLCR

SEQ ID NO: 385 - protein, 38 aa, synthetic construct
  REGION 1..38: note = Description of Artificial Sequence: Synthetic polypeptide
GSICIPCFTTDHQIARKCDDCCGGRGRGKCYGPQCLCR

SEQ ID NO: 386 - protein, 38 aa, synthetic construct
  REGION 1..38: note = Description of Artificial Sequence: Synthetic polypeptide
GSICIPCFTTDHQIARACDDCCGGRGRGKCYGPQCLCR

SEQ ID NO: 387 - protein, 38 aa, synthetic construct
  REGION 1..38: note = Description of Artificial Sequence: Synthetic polypeptide
GSICIPCFTTDHQIARKCDDCCGGKGRGACYGPQCLCR

SEQ ID NO: 388 - protein, 38 aa, synthetic construct
  REGION 1..38: note = Description of Artificial Sequence: Synthetic polypeptide
GSICIPCFTTDHQIARACDDCCGGKGRGACYGPQCLCR

SEQ ID NO: 389 - protein, 38 aa, synthetic construct
  REGION 1..38: note = Description of Artificial Sequence: Synthetic polypeptide
GSICIPCFTTDHQIARRCDDCCGGKGRGACYGPQCLCR

SEQ ID NO: 390 - protein, 38 aa, synthetic construct
  REGION 1..38: note = Description of Artificial Sequence: Synthetic polypeptide
GSICIPCFTTDHQIARKCDDCCGGAGRGACYGPQCLCR

SEQ ID NO: 391 - protein, 38 aa, synthetic construct
  REGION 1..38: note = Description of Artificial Sequence: Synthetic polypeptide
GSICIPCFTTDHQIARACDDCCGGAGRGACYGPQCLCR

SEQ ID NO: 392 - protein, 38 aa, synthetic construct
  REGION 1..38: note = Description of Artificial Sequence: Synthetic polypeptide
GSICIPCFTTDHQIARRCDDCCGGAGRGACYGPQCLCR

SEQ ID NO: 393 - protein, 38 aa, synthetic construct
  REGION 1..38: note = Description of Artificial Sequence: Synthetic polypeptide
GSICIPCFTTDHQIARKCDDCCGGRGRGACYGPQCLCR

SEQ ID NO: 394 - protein, 38 aa, synthetic construct
  REGION 1..38: note = Description of Artificial Sequence: Synthetic polypeptide
GSICIPCFTTDHQIARACDDCCGGRGRGACYGPQCLCR

SEQ ID NO: 395 - protein, 38 aa, synthetic construct
  REGION 1..38: note = Description of Artificial Sequence: Synthetic polypeptide
GSICIPCFTTDHQIARRCDDCCGGRGRGACYGPQCLCR

SEQ ID NO: 396 - protein, 38 aa, synthetic construct
  REGION 1..38: note = Description of Artificial Sequence: Synthetic polypeptide
GSICIPCFTTDHQIARKCDDCCGGKGRGRCYGPQCLCR

SEQ ID NO: 397 - protein, 38 aa, synthetic construct
  REGION 1..38: note = Description of Artificial Sequence: Synthetic polypeptide
GSICIPCFTTDHQIARACDDCCGGKGRGRCYGPQCLCR

SEQ ID NO: 398 - protein, 38 aa, synthetic construct
  REGION 1..38: note = Description of Artificial Sequence: Synthetic polypeptide
GSICIPCFTTDHQIARRCDDCCGGKGRGRCYGPQCLCR

SEQ ID NO: 399 - protein, 38 aa, synthetic construct
  REGION 1..38: note = Description of Artificial Sequence: Synthetic polypeptide
GSICIPCFTTDHQIARKCDDCCGGAGRGRCYGPQCLCR

SEQ ID NO: 400 - protein, 38 aa, synthetic construct
  REGION 1..38: note = Description of Artificial Sequence: Synthetic polypeptide
GSICIPCFTTDHQIARACDDCCGGAGRGRCYGPQCLCR

SEQ ID NO: 401 - protein, 38 aa, synthetic construct
  REGION 1..38: note = Description of Artificial Sequence: Synthetic polypeptide
GSICIPCFTTDHQIARRCDDCCGGAGRGRCYGPQCLCR

SEQ ID NO: 402 - protein, 38 aa, synthetic construct
  REGION 1..38: note = Description of Artificial Sequence: Synthetic polypeptide
GSICIPCFTTDHQIARKCDDCCGGRGRGRCYGPQCLCR

SEQ ID NO: 403 - protein, 38 aa, synthetic construct
  REGION 1..38: note = Description of Artificial Sequence: Synthetic polypeptide
GSICIPCFTTDHQIARACDDCCGGRGRGRCYGPQCLCR

SEQ ID NO: 404 - protein, 38 aa, synthetic construct
  REGION 1..38: note = Description of Artificial Sequence: Synthetic polypeptide
GSICIPCFTTDHQIARRCDDCCGGRGRGRCYGPQCLCR

SEQ ID NO: 405 - protein, 38 aa, synthetic construct
  REGION 1..38: note = Description of Artificial Sequence: Synthetic polypeptide
GSKCIPCFTTDHQIARRCDDCCGGRGRGRCYGPQCLCR

SEQ ID NO: 406 - protein, 38 aa, synthetic construct
  REGION 1..38: note = Description of Artificial Sequence: Synthetic polypeptide
  SITE 17: note = MOD_RES - Citrulline
  SITE 25: note = MOD_RES - Citrulline
GSICIPCFTTDHQIARXCDDCCGGXGRGKCYGPQCLCR

SEQ ID NO: 407 - protein, 38 aa, synthetic construct
  REGION 1..38: note = Description of Artificial Sequence: Synthetic polypeptide
  SITE 17: note = MOD_RES - Citrulline
  SITE 25: note = MOD_RES - Citrulline
  SITE 29: note = MOD_RES - Citrulline
GSICIPCFTTDHQIARXCDDCCGGXGRGXCYGPQCLCR

SEQ ID NO: 408 - protein, 38 aa, synthetic construct
  REGION 1..38: note = Description of Artificial Sequence: Synthetic polypeptide
  SITE 17: note = MOD_RES - Citrulline
  SITE 25: note = MOD_RES - Citrulline
  SITE 29: note = MOD_RES - Citrulline
GSKCIPCFTTDHQIARXCDDCCGGXGRGXCYGPQCLCR

SEQ ID NO: 409 - protein, 38 aa, synthetic construct
  REGION 1..38: note = Description of Artificial Sequence: Synthetic polypeptide
GSTCTPCFTTDHQTARKCDDCCGGKGRGKCYGPQCLCR

SEQ ID NO: 410 - protein, 38 aa, synthetic construct
  REGION 1..38: note = Description of Artificial Sequence: Synthetic polypeptide
GSTCTPCFTTDHQTARACDDCCGGKGRGKCYGPQCLCR

SEQ ID NO: 411 - protein, 38 aa, synthetic construct
  REGION 1..38: note = Description of Artificial Sequence: Synthetic polypeptide
GSTCTPCFTTDHQTARRCDDCCGGKGRGKCYGPQCLCR

SEQ ID NO: 412 - protein, 38 aa, synthetic construct
  REGION 1..38: note = Description of Artificial Sequence: Synthetic polypeptide
GSTCTPCFTTDHQTARKCDDCCGGAGRGKCYGPQCLCR

SEQ ID NO: 413 - protein, 38 aa, synthetic construct
  REGION 1..38: note = Description of Artificial Sequence: Synthetic polypeptide
GSTCTPCFTTDHQTARACDDCCGGAGRGKCYGPQCLCR

SEQ ID NO: 414 - protein, 38 aa, synthetic construct
  REGION 1..38: note = Description of Artificial Sequence: Synthetic polypeptide
GSTCTPCFTTDHQTARRCDDCCGGAGRGKCYGPQCLCR

SEQ ID NO: 415 - protein, 38 aa, synthetic construct
  REGION 1..38: note = Description of Artificial Sequence: Synthetic polypeptide
GSTCTPCFTTDHQTARKCDDCCGGRGRGKCYGPQCLCR

SEQ ID NO: 416 - protein, 38 aa, synthetic construct
  REGION 1..38: note = Description of Artificial Sequence: Synthetic polypeptide
GSTCTPCFTTDHQTARACDDCCGGRGRGKCYGPQCLCR

SEQ ID NO: 417 - protein, 38 aa, synthetic construct
  REGION 1..38: note = Description of Artificial Sequence: Synthetic polypeptide
GSTCTPCFTTDHQTARRCDDCCGGRGRGKCYGPQCLCR

SEQ ID NO: 418 - protein, 38 aa, synthetic construct
  REGION 1..38: note = Description of Artificial Sequence: Synthetic polypeptide
GSTCTPCFTTDHQTARKCDDCCGGKGRGACYGPQCLCR

SEQ ID NO: 419 - protein, 38 aa, synthetic construct
  REGION 1..38: note = Description of Artificial Sequence: Synthetic polypeptide
GSTCTPCFTTDHQTARACDDCCGGKGRGACYGPQCLCR

SEQ ID NO: 420 - protein, 38 aa, synthetic construct
  REGION 1..38: note = Description of Artificial Sequence: Synthetic polypeptide
GSTCTPCFTTDHQTARRCDDCCGGKGRGACYGPQCLCR

SEQ ID NO: 421 - protein, 38 aa, synthetic construct
  REGION 1..38: note = Description of Artificial Sequence: Synthetic polypeptide
GSTCTPCFTTDHQTARKCDDCCGGAGRGACYGPQCLCR

SEQ ID NO: 422 - protein, 38 aa, synthetic construct
  REGION 1..38: note = Description of Artificial Sequence: Synthetic polypeptide
GSTCTPCFTTDHQTARACDDCCGGAGRGACYGPQCLCR

SEQ ID NO: 423 - protein, 38 aa, synthetic construct
  REGION 1..38: note = Description of Artificial Sequence: Synthetic polypeptide
GSTCTPCFTTDHQTARRCDDCCGGAGRGACYGPQCLCR

SEQ ID NO: 424 - protein, 38 aa, synthetic construct
  REGION 1..38: note = Description of Artificial Sequence: Synthetic polypeptide
GSTCTPCFTTDHQTARKCDDCCGGRGRGACYGPQCLCR

SEQ ID NO: 425 - protein, 38 aa, synthetic construct
  REGION 1..38: note = Description of Artificial Sequence: Synthetic polypeptide
GSTCTPCFTTDHQTARACDDCCGGRGRGACYGPQCLCR

SEQ ID NO: 426 - protein, 38 aa, synthetic construct
  REGION 1..38: note = Description of Artificial Sequence: Synthetic polypeptide
GSTCTPCFTTDHQTARRCDDCCGGRGRGACYGPQCLCR

SEQ ID NO: 427 - protein, 38 aa, synthetic construct
  REGION 1..38: note = Description of Artificial Sequence: Synthetic polypeptide
GSTCTPCFTTDHQTARKCDDCCGGKGRGRCYGPQCLCR

SEQ ID NO: 428 - protein, 38 aa, synthetic construct
  REGION 1..38: note = Description of Artificial Sequence: Synthetic polypeptide
GSTCTPCFTTDHQTARACDDCCGGKGRGRCYGPQCLCR

SEQ ID NO: 429 - protein, 38 aa, synthetic construct
  REGION 1..38: note = Description of Artificial Sequence: Synthetic polypeptide
GSTCTPCFTTDHQTARRCDDCCGGKGRGRCYGPQCLCR

SEQ ID NO: 430 - protein, 38 aa, synthetic construct
  REGION 1..38: note = Description of Artificial Sequence: Synthetic polypeptide
GSTCTPCFTTDHQTARKCDDCCGGAGRGRCYGPQCLCR

SEQ ID NO: 431 - protein, 38 aa, synthetic construct
  REGION 1..38: note = Description of Artificial Sequence: Synthetic polypeptide
GSTCTPCFTTDHQTARACDDCCGGAGRGRCYGPQCLCR

SEQ ID NO: 432 - protein, 38 aa, synthetic construct
  REGION 1..38: note = Description of Artificial Sequence: Synthetic polypeptide
GSTCTPCFTTDHQTARRCDDCCGGAGRGRCYGPQCLCR

SEQ ID NO: 433 - protein, 38 aa, synthetic construct
  REGION 1..38: note = Description of Artificial Sequence: Synthetic polypeptide
GSTCTPCFTTDHQTARKCDDCCGGRGRGRCYGPQCLCR

SEQ ID NO: 434 - protein, 38 aa, synthetic construct
  REGION 1..38: note = Description of Artificial Sequence: Synthetic polypeptide
GSTCTPCFTTDHQTARACDDCCGGRGRGRCYGPQCLCR

SEQ ID NO: 435 - protein, 38 aa, synthetic construct
  REGION 1..38: note = Description of Artificial Sequence: Synthetic polypeptide
GSTCTPCFTTDHQTARRCDDCCGGRGRGRCYGPQCLCR

SEQ ID NO: 436 - protein, 38 aa, synthetic construct
  REGION 1..38: note = Description of Artificial Sequence: Synthetic polypeptide
GSKCTPCFTTDHQTARRCDDCCGGRGRGRCYGPQCLCR

SEQ ID NO: 437 - protein, 38 aa, synthetic construct
  REGION 1..38: note = Description of Artificial Sequence: Synthetic polypeptide
  SITE 17: note = MOD_RES - Citrulline
  SITE 25: note = MOD_RES - Citrulline
GSTCTPCFTTDHQTARXCDDCCGGXGRGKCYGPQCLCR

SEQ ID NO: 438 - protein, 38 aa, synthetic construct
  REGION 1..38: note = Description of Artificial Sequence: Synthetic polypeptide
  SITE 17: note = MOD_RES - Citrulline
  SITE 25: note = MOD_RES - Citrulline
  SITE 29: note = MOD_RES - Citrulline
GSTCTPCFTTDHQTARXCDDCCGGXGRGXCYGPQCLCR

SEQ ID NO: 439 - protein, 38 aa, synthetic construct
  REGION 1..38: note = Description of Artificial Sequence: Synthetic polypeptide
  SITE 17: note = MOD_RES - Citrulline
  SITE 25: note = MOD_RES - Citrulline
  SITE 29: note = MOD_RES - Citrulline
GSKCTPCFTTDHQTARXCDDCCGGXGRGXCYGPQCLCR

SEQ ID NO: 440 - protein, 38 aa, synthetic construct
  REGION 1..38: note = Description of Artificial Sequence: Synthetic polypeptide
GSVCVPCFTTDHQVARKCDDCCGGKGRGKCYGPQCLCR

SEQ ID NO: 441 - protein, 38 aa, synthetic construct
  REGION 1..38: note = Description of Artificial Sequence: Synthetic polypeptide
GSVCVPCFTTDHQVARACDDCCGGKGRGKCYGPQCLCR

SEQ ID NO: 442 - protein, 38 aa, synthetic construct
  REGION 1..38: note = Description of Artificial Sequence: Synthetic polypeptide
GSVCVPCFTTDHQVARRCDDCCGGKGRGKCYGPQCLCR

SEQ ID NO: 443 - protein, 38 aa, synthetic construct
  REGION 1..38: note = Description of Artificial Sequence: Synthetic polypeptide
GSVCVPCFTTDHQVARKCDDCCGGAGRGKCYGPQCLCR

SEQ ID NO: 444 - protein, 38 aa, synthetic construct
  REGION 1..38: note = Description of Artificial Sequence: Synthetic polypeptide
GSVCVPCFTTDHQVARACDDCCGGAGRGKCYGPQCLCR

SEQ ID NO: 445 - protein, 38 aa, synthetic construct
  REGION 1..38: note = Description of Artificial Sequence: Synthetic polypeptide
GSVCVPCFTTDHQVARRCDDCCGGAGRGKCYGPQCLCR

SEQ ID NO: 446 - protein, 38 aa, synthetic construct
  REGION 1..38: note = Description of Artificial Sequence: Synthetic polypeptide
GSVCVPCFTTDHQVARKCDDCCGGRGRGKCYGPQCLCR

SEQ ID NO: 447 - protein, 38 aa, synthetic construct
  REGION 1..38: note = Description of Artificial Sequence: Synthetic polypeptide
GSVCVPCFTTDHQVARACDDCCGGRGRGKCYGPQCLCR

SEQ ID NO: 448 - protein, 38 aa, synthetic construct
  REGION 1..38: note = Description of Artificial Sequence: Synthetic polypeptide
GSVCVPCFTTDHQVARRCDDCCGGRGRGKCYGPQCLCR

SEQ ID NO: 449 - protein, 38 aa, synthetic construct
  REGION 1..38: note = Description of Artificial Sequence: Synthetic polypeptide
GSVCVPCFTTDHQVARKCDDCCGGKGRGACYGPQCLCR

SEQ ID NO: 450 - protein, 38 aa, synthetic construct
  REGION 1..38: note = Description of Artificial Sequence: Synthetic polypeptide
GSVCVPCFTTDHQVARACDDCCGGKGRGACYGPQCLCR

SEQ ID NO: 451 - protein, 38 aa, synthetic construct
  REGION 1..38: note = Description of Artificial Sequence: Synthetic polypeptide
GSVCVPCFTTDHQVARRCDDCCGGKGRGACYGPQCLCR

SEQ ID NO: 452 - protein, 38 aa, synthetic construct
  REGION 1..38: note = Description of Artificial Sequence: Synthetic polypeptide
GSVCVPCFTTDHQVARKCDDCCGGAGRGACYGPQCLCR

SEQ ID NO: 453 - protein, 38 aa, synthetic construct
  REGION 1..38: note = Description of Artificial Sequence: Synthetic polypeptide
GSVCVPCFTTDHQVARACDDCCGGAGRGACYGPQCLCR

SEQ ID NO: 454 - protein, 38 aa, synthetic construct
  REGION 1..38: note = Description of Artificial Sequence: Synthetic polypeptide
GSVCVPCFTTDHQVARRCDDCCGGAGRGACYGPQCLCR

SEQ ID NO: 455 - protein, 38 aa, synthetic construct
  REGION 1..38: note = Description of Artificial Sequence: Synthetic polypeptide
GSVCVPCFTTDHQVARKCDDCCGGRGRGACYGPQCLCR

SEQ ID NO: 456 - protein, 38 aa, synthetic construct
  REGION 1..38: note = Description of Artificial Sequence: Synthetic polypeptide
GSVCVPCFTTDHQVARACDDCCGGRGRGACYGPQCLCR

SEQ ID NO: 457 - protein, 38 aa, synthetic construct
  REGION 1..38: note = Description of Artificial Sequence: Synthetic polypeptide
GSVCVPCFTTDHQVARRCDDCCGGRGRGACYGPQCLCR

SEQ ID NO: 458 - protein, 38 aa, synthetic construct
  REGION 1..38: note = Description of Artificial Sequence: Synthetic polypeptide
GSVCVPCFTTDHQVARKCDDCCGGKGRGRCYGPQCLCR

SEQ ID NO: 459 - protein, 38 aa, synthetic construct
  REGION 1..38: note = Description of Artificial Sequence: Synthetic polypeptide
GSVCVPCFTTDHQVARACDDCCGGKGRGRCYGPQCLCR

SEQ ID NO: 460 - protein, 38 aa, synthetic construct
  REGION 1..38: note = Description of Artificial Sequence: Synthetic polypeptide
GSVCVPCFTTDHQVARRCDDCCGGKGRGRCYGPQCLCR

SEQ ID NO: 461 - protein, 38 aa, synthetic construct
  REGION 1..38: note = Description of Artificial Sequence: Synthetic polypeptide
GSVCVPCFTTDHQVARKCDDCCGGAGRGRCYGPQCLCR

SEQ ID NO: 462 - protein, 38 aa, synthetic construct
  REGION 1..38: note = Description of Artificial Sequence: Synthetic polypeptide
GSVCVPCFTTDHQVARACDDCCGGAGRGRCYGPQCLCR

SEQ ID NO: 463 - protein, 38 aa, synthetic construct
  REGION 1..38: note = Description of Artificial Sequence: Synthetic polypeptide
GSVCVPCFTTDHQVARRCDDCCGGAGRGRCYGPQCLCR

SEQ ID NO: 464 - protein, 38 aa, synthetic construct
  REGION 1..38: note = Description of Artificial Sequence: Synthetic polypeptide
GSVCVPCFTTDHQVARKCDDCCGGRGRGRCYGPQCLCR

SEQ ID NO: 465 - protein, 38 aa, synthetic construct
  REGION 1..38: note = Description of Artificial Sequence: Synthetic polypeptide
GSVCVPCFTTDHQVARACDDCCGGRGRGRCYGPQCLCR

SEQ ID NO: 466 - protein, 38 aa, synthetic construct
  REGION 1..38: note = Description of Artificial Sequence: Synthetic polypeptide
GSVCVPCFTTDHQVARRCDDCCGGRGRGRCYGPQCLCR

SEQ ID NO: 467 - protein, 38 aa, synthetic construct
  REGION 1..38: note = Description of Artificial Sequence: Synthetic polypeptide
GSKCVPCFTTDHQVARRCDDCCGGRGRGRCYGPQCLCR

SEQ ID NO: 468 - protein, 38 aa, synthetic construct
  REGION 1..38: note = Description of Artificial Sequence: Synthetic polypeptide
  SITE 17: note = MOD_RES - Citrulline
  SITE 25: note = MOD_RES - Citrulline
GSVCVPCFTTDHQVARXCDDCCGGXGRGKCYGPQCLCR

SEQ ID NO: 469 - protein, 38 aa, synthetic construct
  REGION 1..38: note = Description of Artificial Sequence: Synthetic polypeptide
  SITE 17: note = MOD_RES - Citrulline
  SITE 25: note = MOD_RES - Citrulline
  SITE 29: note = MOD_RES - Citrulline
GSVCVPCFTTDHQVARXCDDCCGGXGRGXCYGPQCLCR

SEQ ID NO: 470 - protein, 38 aa, synthetic construct
  REGION 1..38: note = Description of Artificial Sequence: Synthetic polypeptide
  SITE 17: note = MOD_RES - Citrulline
  SITE 25: note = MOD_RES - Citrulline
  SITE 29: note = MOD_RES - Citrulline
GSKCVPCFTTDHQVARXCDDCCGGXGRGXCYGPQCLCR

SEQ ID NO: 471 - protein, 38 aa, synthetic construct
  REGION 1..38: note = Description of Artificial Sequence: Synthetic polypeptide
GSLCLPCFTTDHQLARKCDDCCGGKGRGKCYGPQCLCR

SEQ ID NO: 472 - protein, 38 aa, synthetic construct
  REGION 1..38: note = Description of Artificial Sequence: Synthetic polypeptide
GSLCLPCFTTDHQLARACDDCCGGKGRGKCYGPQCLCR

SEQ ID NO: 473 - protein, 38 aa, synthetic construct
  REGION 1..38: note = Description of Artificial Sequence: Synthetic polypeptide
GSLCLPCFTTDHQLARRCDDCCGGKGRGKCYGPQCLCR

SEQ ID NO: 474 - protein, 38 aa, synthetic construct
  REGION 1..38: note = Description of Artificial Sequence: Synthetic polypeptide
GSLCLPCFTTDHQLARKCDDCCGGAGRGKCYGPQCLCR

SEQ ID NO: 475 - protein, 38 aa, synthetic construct
  REGION 1..38: note = Description of Artificial Sequence: Synthetic polypeptide
GSLCLPCFTTDHQLARACDDCCGGAGRGKCYGPQCLCR

SEQ ID NO: 476 - protein, 38 aa, synthetic construct
  REGION 1..38: note = Description of Artificial Sequence: Synthetic polypeptide
GSLCLPCFTTDHQLARRCDDCCGGAGRGKCYGPQCLCR

SEQ ID NO: 477 - protein, 38 aa, synthetic construct
  REGION 1..38: note = Description of Artificial Sequence: Synthetic polypeptide
GSLCLPCFTTDHQLARKCDDCCGGRGRGKCYGPQCLCR

SEQ ID NO: 478 - protein, 38 aa, synthetic construct
  REGION 1..38: note = Description of Artificial Sequence: Synthetic polypeptide
GSLCLPCFTTDHQLARACDDCCGGRGRGKCYGPQCLCR

SEQ ID NO: 479 - protein, 38 aa, synthetic construct
  REGION 1..38: note = Description of Artificial Sequence: Synthetic polypeptide
GSLCLPCFTTDHQLARRCDDCCGGRGRGKCYGPQCLCR

SEQ ID NO: 480 - protein, 38 aa, synthetic construct
  REGION 1..38: note = Description of Artificial Sequence: Synthetic polypeptide
GSLCLPCFTTDHQLARKCDDCCGGKGRGACYGPQCLCR

SEQ ID NO: 481 - protein, 38 aa, synthetic construct
  REGION 1..38: note = Description of Artificial Sequence: Synthetic polypeptide
GSLCLPCFTTDHQLARACDDCCGGKGRGACYGPQCLCR

SEQ ID NO: 482 - protein, 38 aa, synthetic construct
  REGION 1..38: note = Description of Artificial Sequence: Synthetic polypeptide
GSLCLPCFTTDHQLARRCDDCCGGKGRGACYGPQCLCR

SEQ ID NO: 483 - protein, 38 aa, synthetic construct
  REGION 1..38: note = Description of Artificial Sequence: Synthetic polypeptide
GSLCLPCFTTDHQLARKCDDCCGGAGRGACYGPQCLCR

SEQ ID NO: 484 - protein, 38 aa, synthetic construct
  REGION 1..38: note = Description of Artificial Sequence: Synthetic polypeptide
GSLCLPCFTTDHQLARACDDCCGGAGRGACYGPQCLCR

SEQ ID NO: 485 - protein, 38 aa, synthetic construct
  REGION 1..38: note = Description of Artificial Sequence: Synthetic polypeptide
GSLCLPCFTTDHQLARRCDDCCGGAGRGACYGPQCLCR

SEQ ID NO: 486 - protein, 38 aa, synthetic construct
  REGION 1..38: note = Description of Artificial Sequence: Synthetic polypeptide
GSLCLPCFTTDHQLARKCDDCCGGRGRGACYGPQCLCR

SEQ ID NO: 487 - protein, 38 aa, synthetic construct
  REGION 1..38: note = Description of Artificial Sequence: Synthetic polypeptide
GSLCLPCFTTDHQLARACDDCCGGRGRGACYGPQCLCR

SEQ ID NO: 488 - protein, 38 aa, synthetic construct
  REGION 1..38: note = Description of Artificial Sequence: Synthetic polypeptide
GSLCLPCFTTDHQLARRCDDCCGGRGRGACYGPQCLCR

SEQ ID NO: 489 - protein, 38 aa, synthetic construct
  REGION 1..38: note = Description of Artificial Sequence: Synthetic polypeptide
GSLCLPCFTTDHQLARKCDDCCGGKGRGRCYGPQCLCR

SEQ ID NO: 490 - protein, 38 aa, synthetic construct
  REGION 1..38: note = Description of Artificial Sequence: Synthetic polypeptide
GSLCLPCFTTDHQLARACDDCCGGKGRGRCYGPQCLCR

SEQ ID NO: 491 - protein, 38 aa, synthetic construct
  REGION 1..38: note = Description of Artificial Sequence: Synthetic polypeptide
GSLCLPCFTTDHQLARRCDDCCGGKGRGRCYGPQCLCR

SEQ ID NO: 492 - protein, 38 aa, synthetic construct
  REGION 1..38: note = Description of Artificial Sequence: Synthetic polypeptide
GSLCLPCFTTDHQLARKCDDCCGGAGRGRCYGPQCLCR

SEQ ID NO: 493 - protein, 38 aa, synthetic construct
  REGION 1..38: note = Description of Artificial Sequence: Synthetic polypeptide
GSLCLPCFTTDHQLARACDDCCGGAGRGRCYGPQCLCR

SEQ ID NO: 494 - protein, 38 aa, synthetic construct
  REGION 1..38: note = Description of Artificial Sequence: Synthetic polypeptide
GSLCLPCFTTDHQLARRCDDCCGGAGRGRCYGPQCLCR

SEQ ID NO: 495 - protein, 38 aa, synthetic construct
  REGION 1..38: note = Description of Artificial Sequence: Synthetic polypeptide
GSLCLPCFTTDHQLARKCDDCCGGRGRGRCYGPQCLCR

SEQ ID NO: 496 - protein, 38 aa, synthetic construct
  REGION 1..38: note = Description of Artificial Sequence: Synthetic polypeptide
GSLCLPCFTTDHQLARACDDCCGGRGRGRCYGPQCLCR

SEQ ID NO: 497 - protein, 38 aa, synthetic construct
  REGION 1..38: note = Description of Artificial Sequence: Synthetic polypeptide
GSLCLPCFTTDHQLARRCDDCCGGRGRGRCYGPQCLCR

SEQ ID NO: 498 - protein, 38 aa, synthetic construct
  REGION 1..38: note = Description of Artificial Sequence: Synthetic polypeptide
GSKCLPCFTTDHQLARRCDDCCGGRGRGRCYGPQCLCR

SEQ ID NO: 499 - protein, 38 aa, synthetic construct
  REGION 1..38: note = Description of Artificial Sequence: Synthetic polypeptide
  SITE 17: note = MOD_RES - Citrulline
  SITE 25: note = MOD_RES - Citrulline
GSLCLPCFTTDHQLARXCDDCCGGXGRGKCYGPQCLCR

SEQ ID NO: 500 - protein, 38 aa, synthetic construct
  REGION 1..38: note = Description of Artificial Sequence: Synthetic polypeptide
  SITE 17: note = MOD_RES - Citrulline
  SITE 25: note = MOD_RES - Citrulline
  SITE 29: note = MOD_RES - Citrulline
GSLCLPCFTTDHQLARXCDDCCGGXGRGXCYGPQCLCR

SEQ ID NO: 501 - protein, 38 aa, synthetic construct
  REGION 1..38: note = Description of Artificial Sequence: Synthetic polypeptide
  SITE 17: note = MOD_RES - Citrulline
  SITE 25: note = MOD_RES - Citrulline
  SITE 29: note = MOD_RES - Citrulline
GSKCLPCFTTDHQLARXCDDCCGGXGRGXCYGPQCLCR

SEQ ID NO: 502 - protein, 38 aa, synthetic construct
  REGION 1..38: note = Description of Artificial Sequence: Synthetic polypeptide
GSSCSPCFTTDHQSARKCDDCCGGKGRGKCYGPQCLCR

SEQ ID NO: 503 - protein, 38 aa, synthetic construct
  REGION 1..38: note = Description of Artificial Sequence: Synthetic polypeptide
GSSCSPCFTTDHQSARACDDCCGGKGRGKCYGPQCLCR

SEQ ID NO: 504 - protein, 38 aa, synthetic construct
  REGION 1..38: note = Description of Artificial Sequence: Synthetic polypeptide
GSSCSPCFTTDHQSARRCDDCCGGKGRGKCYGPQCLCR

SEQ ID NO: 505 - protein, 38 aa, synthetic construct
  REGION 1..38: note = Description of Artificial Sequence: Synthetic polypeptide
GSSCSPCFTTDHQSARKCDDCCGGAGRGKCYGPQCLCR

SEQ ID NO: 506 - protein, 38 aa, synthetic construct
  REGION 1..38: note = Description of Artificial Sequence: Synthetic polypeptide
GSSCSPCFTTDHQSARACDDCCGGAGRGKCYGPQCLCR

SEQ ID NO: 507 - protein, 38 aa, synthetic construct
  REGION 1..38: note = Description of Artificial Sequence: Synthetic polypeptide
GSSCSPCFTTDHQSARRCDDCCGGAGRGKCYGPQCLCR

SEQ ID NO: 508 - protein, 38 aa, synthetic construct
  REGION 1..38: note = Description of Artificial Sequence: Synthetic polypeptide
GSSCSPCFTTDHQSARKCDDCCGGRGRGKCYGPQCLCR

SEQ ID NO: 509 - protein, 38 aa, synthetic construct
  REGION 1..38: note = Description of Artificial Sequence: Synthetic polypeptide
GSSCSPCFTTDHQSARACDDCCGGRGRGKCYGPQCLCR

SEQ ID NO: 510 - protein, 38 aa, synthetic construct
  REGION 1..38: note = Description of Artificial Sequence: Synthetic polypeptide
GSSCSPCFTTDHQSARRCDDCCGGRGRGKCYGPQCLCR

SEQ ID NO: 511 - protein, 38 aa, synthetic construct
  REGION 1..38: note = Description of Artificial Sequence: Synthetic polypeptide
GSSCSPCFTTDHQSARKCDDCCGGKGRGACYGPQCLCR

SEQ ID NO: 512 - protein, 38 aa, synthetic construct
  REGION 1..38: note = Description of Artificial Sequence: Synthetic polypeptide
GSSCSPCFTTDHQSARACDDCCGGKGRGACYGPQCLCR

SEQ ID NO: 513 - protein, 38 aa, synthetic construct
  REGION 1..38: note = Description of Artificial Sequence: Synthetic polypeptide
GSSCSPCFTTDHQSARRCDDCCGGKGRGACYGPQCLCR

SEQ ID NO: 514 - protein, 38 aa, synthetic construct
  REGION 1..38: note = Description of Artificial Sequence: Synthetic polypeptide
GSSCSPCFTTDHQSARKCDDCCGGAGRGACYGPQCLCR

SEQ ID NO: 515 - protein, 38 aa, synthetic construct
  REGION 1..38: note = Description of Artificial Sequence: Synthetic polypeptide
GSSCSPCFTTDHQSARACDDCCGGAGRGACYGPQCLCR

SEQ ID NO: 516 - protein, 38 aa, synthetic construct
  REGION 1..38: note = Description of Artificial Sequence: Synthetic polypeptide
GSSCSPCFTTDHQSARRCDDCCGGAGRGACYGPQCLCR

SEQ ID NO: 517 - protein, 38 aa, synthetic construct
  REGION 1..38: note = Description of Artificial Sequence: Synthetic polypeptide
GSSCSPCFTTDHQSARKCDDCCGGRGRGACYGPQCLCR

SEQ ID NO: 518 - protein, 38 aa, synthetic construct
  REGION 1..38: note = Description of Artificial Sequence: Synthetic polypeptide
GSSCSPCFTTDHQSARACDDCCGGRGRGACYGPQCLCR

SEQ ID NO: 519 - protein, 38 aa, synthetic construct
  REGION 1..38: note = Description of Artificial Sequence: Synthetic polypeptide
GSSCSPCFTTDHQSARRCDDCCGGRGRGACYGPQCLCR

SEQ ID NO: 520 - protein, 38 aa, synthetic construct
  REGION 1..38: note = Description of Artificial Sequence: Synthetic polypeptide
GSSCSPCFTTDHQSARKCDDCCGGKGRGRCYGPQCLCR

SEQ ID NO: 521 - protein, 38 aa, synthetic construct
  REGION 1..38: note = Description of Artificial Sequence: Synthetic polypeptide
GSSCSPCFTTDHQSARACDDCCGGKGRGRCYGPQCLCR

SEQ ID NO: 522 - protein, 38 aa, synthetic construct
  REGION 1..38: note = Description of Artificial Sequence: Synthetic polypeptide
GSSCSPCFTTDHQSARRCDDCCGGKGRGRCYGPQCLCR

SEQ ID NO: 523 - protein, 38 aa, synthetic construct
  REGION 1..38: note = Description of Artificial Sequence: Synthetic polypeptide
GSSCSPCFTTDHQSARKCDDCCGGAGRGRCYGPQCLCR

SEQ ID NO: 524 - protein, 38 aa, synthetic construct
  REGION 1..38: note = Description of Artificial Sequence: Synthetic polypeptide
GSSCSPCFTTDHQSARACDDCCGGAGRGRCYGPQCLCR

SEQ ID NO: 525 - protein, 38 aa, synthetic construct
  REGION 1..38: note = Description of Artificial Sequence: Synthetic polypeptide
GSSCSPCFTTDHQSARRCDDCCGGAGRGRCYGPQCLCR

SEQ ID NO: 526 - protein, 38 aa, synthetic construct
  REGION 1..38: note = Description of Artificial Sequence: Synthetic polypeptide
GSSCSPCFTTDHQSARKCDDCCGGRGRGRCYGPQCLCR

SEQ ID NO: 527 - protein, 38 aa, synthetic construct
  REGION 1..38: note = Description of Artificial Sequence: Synthetic polypeptide
GSSCSPCFTTDHQSARACDDCCGGRGRGRCYGPQCLCR

SEQ ID NO: 528 - protein, 38 aa, synthetic construct
  REGION 1..38: note = Description of Artificial Sequence: Synthetic polypeptide
GSSCSPCFTTDHQSARRCDDCCGGRGRGRCYGPQCLCR

SEQ ID NO: 529 - protein, 38 aa, synthetic construct
  REGION 1..38: note = Description of Artificial Sequence: Synthetic polypeptide
GSKCSPCFTTDHQSARRCDDCCGGRGRGRCYGPQCLCR

SEQ ID NO: 530 - protein, 38 aa, synthetic construct
  REGION 1..38: note = Description of Artificial Sequence: Synthetic polypeptide
  SITE 17: note = MOD_RES - Citrulline
  SITE 25: note = MOD_RES - Citrulline
GSSCSPCFTTDHQSARXCDDCCGGXGRGKCYGPQCLCR

SEQ ID NO: 531 - protein, 38 aa, synthetic construct
  REGION 1..38: note = Description of Artificial Sequence: Synthetic polypeptide
  SITE 17: note = MOD_RES - Citrulline
  SITE 25: note = MOD_RES - Citrulline
  SITE 29: note = MOD_RES - Citrulline
GSSCSPCFTTDHQSARXCDDCCGGXGRGXCYGPQCLCR

SEQ ID NO: 532 - protein, 38 aa, synthetic construct
  REGION 1..38: note = Description of Artificial Sequence: Synthetic polypeptide
  SITE 17: note = MOD_RES - Citrulline
  SITE 25: note = MOD_RES - Citrulline
  SITE 29: note = MOD_RES - Citrulline
GSKCSPCFTTDHQSARXCDDCCGGXGRGXCYGPQCLCR

SEQ ID NO: 533 - protein, 38 aa, synthetic construct
  REGION 1..38: note = Description of Artificial Sequence: Synthetic polypeptide
GSMCMPCFTTDPNMARKCRDCCGGNGKCFGPQCLCNRG

SEQ ID NO: 534 - protein, 38 aa, synthetic construct
  REGION 1..38: note = Description of Artificial Sequence: Synthetic polypeptide
GSMCMPCFTTDHNMAKKCRDCCGGNGKCFGYQCLCNRG

SEQ ID NO: 535 - protein, 38 aa, synthetic construct
  REGION 1..38: note = Description of Artificial Sequence: Synthetic polypeptide
GSMCMPCFTTDHQTARRCRDCCGGRGRKCFGQCLCGYD

SEQ ID NO: 536 - protein, 38 aa, synthetic construct
  REGION 1..38: note = Description of Artificial Sequence: Synthetic polypeptide
GSACGPCFTTDPQMAEKCSDCCGGIGTCYGPQCLCNRL

SEQ ID NO: 537 - protein, 36 aa, synthetic construct
  REGION 1..36: note = Description of Artificial Sequence: Synthetic polypeptide
GSMCMPCFTTRPNMAQQCRDCCRGRGKCFGPQCLCG

SEQ ID NO: 538 - protein, 38 aa, synthetic construct
  REGION 1..38: note = Description of Artificial Sequence: Synthetic polypeptide
GSMCMPCFTTRPNMAQQCRDCCRGRGKCFGPQCLCGYD

SEQ ID NO: 539 - protein, 36 aa, synthetic construct
  REGION 1..36: note = Description of Artificial Sequence: Synthetic polypeptide
GSMCMPCFTTNLNMEQECRDCCGGTGRCFGPQCLCG

SEQ ID NO: 540 - protein, 38 aa, synthetic construct
  REGION 1..38: note = Description of Artificial Sequence: Synthetic polypeptide
GSGCMPCFTTDRYMARKCKECCRGYGNCFGPQCLCNRG

SEQ ID NO: 541 - protein, 38 aa, synthetic construct
  REGION 1..38: note = Description of Artificial Sequence: Synthetic polypeptide
GSGCGPCFTTDANMARKCRECCGGNGKCFGPQCLCNRE

SEQ ID NO: 542 - protein, 38 aa, synthetic construct
  REGION 1..38: note = Description of Artificial Sequence: Synthetic polypeptide
GSGCGPCFTTDANMARKCRECCGGIGKCFGPQCLCNRI

SEQ ID NO: 543 - protein, 36 aa, synthetic construct
  REGION 1..36: note = Description of Artificial Sequence: Synthetic polypeptide
GSMCMPCFTTRPDMAQQCRACCKGRGKCFGPQCLCG

SEQ ID NO: 544 - protein, 36 aa, synthetic construct
  REGION 1..36: note = Description of Artificial Sequence: Synthetic polypeptide
GSMCIPCFTTNPNMAAKCNACCGSRRGSCRGPQCIC

SEQ ID NO: 545 - protein, 37 aa, synthetic construct
  REGION 1..37: note = Description of Artificial Sequence: Synthetic polypeptide
GSMCMPCFTTRPDMAQQCRDCCGGNGKCFGYQCLCNR

SEQ ID NO: 546 - protein, 36 aa, synthetic construct
  REGION 1..36: note = Description of Artificial Sequence: Synthetic polypeptide
GSCGPCFTTDPYTESKCATCCGGRGKCVGPQCLCNR

SEQ ID NO: 547 - protein, 37 aa, synthetic construct
  REGION 1..37: note = Description of Artificial Sequence: Synthetic polypeptide
GSRCGPCFTTDPQTQAKCSECCGRKGGVCKGPQCICG

SEQ ID NO: 548 - protein, 37 aa, synthetic construct
  REGION 1..37: note = Description of Artificial Sequence: Synthetic polypeptide
GSCGPCFTKDPETEKKCATCCGGIGRCFGPQCLCNRG

SEQ ID NO: 549 - protein, 38 aa, synthetic construct
  REGION 1..38: note = Description of Artificial Sequence: Synthetic polypeptide
GSMCMPCFTTDHQMARRCDDCCGGRGRGKCWGPQCLCR

SEQ ID NO: 550 - protein, 39 aa, synthetic construct
  REGION 1..39: note = Description of Artificial Sequence: Synthetic polypeptide
GSAMCMPCFTTDHNMAKKCRDCCGGNGKCFGPQCLCNRG

SEQ ID NO: 551 - protein, 37 aa, synthetic construct
  REGION 1..37: note = Description of Artificial Sequence: Synthetic polypeptide
GSCGPCFTTDWESEKKCAECCGGIGRCFGPQCLCNRK

SEQ ID NO: 552 - protein, 36 aa, synthetic construct
  REGION 1..36: note = Description of Artificial Sequence: Synthetic polypeptide
GSCGPCFTTDHQTEQKCAECCGGIGKCYGPQCLCRG

SEQ ID NO: 553 - protein, 36 aa, synthetic construct
  REGION 1..36: note = Description of Artificial Sequence: Synthetic polypeptide
GSCGPCFTTDRQMEQKCAECCGGIGKCYGPQCLCRG

SEQ ID NO: 554 - protein, 34 aa, synthetic construct
  REGION 1..34: note = Description of Artificial Sequence: Synthetic polypeptide
GSCGPCFTTDHQTEQKCAECCGGIGKCYGPQCLC

SEQ ID NO: 555 - protein, 36 aa, synthetic construct
  REGION 1..36: note = Description of Artificial Sequence: Synthetic polypeptide
GSCMPCFTTDHQMARKCDDCCGGRGKCYGPQCLCRG

SEQ ID NO: 556 - protein, 39 aa, synthetic construct
  REGION 1..39: note = Description of Artificial Sequence: Synthetic polypeptide
GSRCGPCFTTDPQTQAKCSECCGRKGGVCKGPQCICGIQ

SEQ ID NO: 557 - protein, 37 aa, synthetic construct
  REGION 1..37: note = Description of Artificial Sequence: Synthetic polypeptide
GSRCPPCFTTNPNMEADCRKCCGGRGYCASYQCICPG

SEQ ID NO: 558 - protein, 37 aa, synthetic construct
  REGION 1..37: note = Description of Artificial Sequence: Synthetic polypeptide
GSCGPCFTTDHNMARKCDECCGGKGRGKCFGPQCLCR

SEQ ID NO: 559 - protein, 38 aa, synthetic construct
  REGION 1..38: note = Description of Artificial Sequence: Synthetic polypeptide
GSVCMPCFTTDQQMARKCSDCCGGKGRGKCYGPQCLCR

SEQ ID NO: 560 - protein, 38 aa, synthetic construct
  REGION 1..38: note = Description of Artificial Sequence: Synthetic polypeptide
GSMCGPCFTTDANMARKCRECCGGIGKCFGPQCLCNRI

SEQ ID NO: 561 - protein, 38 aa, synthetic construct
  REGION 1..38: note = Description of Artificial Sequence: Synthetic polypeptide
GSMCGPCFTTDANMAAACRECCGGIGKCFGPQCLCNRI

SEQ ID NO: 562 - protein, 38 aa, synthetic construct
  REGION 1..38: note = Description of Artificial Sequence: Synthetic polypeptide
GSMCGPCFTTDANMARKCAECCGGIGKCFGPQCLCNRI

SEQ ID NO: 563 - protein, 38 aa, synthetic construct
  REGION 1..38: note = Description of Artificial Sequence: Synthetic polypeptide
GSMCGPCFTTDANMARKCRECCGGIGACFGPQCLCNRI

SEQ ID NO: 564 - protein, 38 aa, synthetic construct
  REGION 1..38: note = Description of Artificial Sequence: Synthetic polypeptide
GSMCGPCFTTDANMARKCRECCGGIGKCFGPQCLCNAI

SEQ ID NO: 565 - protein, 37 aa, synthetic construct
  REGION 1..37: note = Description of Artificial Sequence: Synthetic polypeptide
GSCMPCFTTRPNMAQQCRDCCRGRGKCFGPQCLCGYD

SEQ ID NO: 566 - protein, 38 aa, synthetic construct
  REGION 1..38: note = Description of Artificial Sequence: Synthetic polypeptide
GSMCMPCFTTNLNMEQECRDCCGGTGRCFGPQCLCGYD

SEQ ID NO: 567 - protein, 37 aa, synthetic construct; identical to SEQ ID NO: 565
  REGION 1..37: note = Description of Artificial Sequence: Synthetic polypeptide

SEQ ID NO: 568 - protein, 36 aa, synthetic construct
  REGION 1..36: note = Description of Artificial Sequence: Synthetic polypeptide
MCMPCFTTDHQMARKCDDCCGGKGRGKCYGPQCLCR

SEQ ID NO: 569 - protein, 36 aa, synthetic construct
  REGION 1..36: note = Description of Artificial Sequence: Synthetic polypeptide
MCMPCFTTDHQMARRCDDCCGGRGRGKCYGPQCLCR

SEQ ID NO: 570 - protein, 36 aa, synthetic construct
  REGION 1..36: note = Description of Artificial Sequence: Synthetic polypeptide
MCMPCFTTDHQMARRCDDCCGGRGRGRCYGPQCLCR

SEQ ID NO: 571 - protein, 36 aa, synthetic construct
  REGION 1..36: note = Description of Artificial Sequence: Synthetic polypeptide
MCMPCFTTDHQMARKCDDCCGGRGRGRCYGPQCLCR

SEQ ID NO: 572 - protein, 36 aa, synthetic construct
  REGION 1..36: note = Description of Artificial Sequence: Synthetic polypeptide
MCMPCFTTDHQMARRCDDCCGGKGRGRCYGPQCLCR

SEQ ID NO: 573 - protein, 36 aa, synthetic construct
  REGION 1..36: note = Description of Artificial Sequence: Synthetic polypeptide
MCMPCFTTHHRMAENCDICCGGDGRGKCYGPQCLCR

SEQ ID NO: 574 - protein, 36 aa, synthetic construct
  REGION 1..36: note = Description of Artificial Sequence: Synthetic polypeptide
MCMPCFTTDTQMQERCDRCCGGGGRGKCWGPQCLCI

SEQ ID NO: 575 - protein, 36 aa, synthetic construct
  REGION 1..36: note = Description of Artificial Sequence: Synthetic polypeptide
MCMPCFTTDTQMQERCDRCCGGGGRGRCWGPQCLCI

SEQ ID NO: 576 - protein, 36 aa, synthetic construct
  REGION 1..36: note = Description of Artificial Sequence: Synthetic polypeptide
MCMPCFTTEQRMAIICDDCCGGFGRGKCYGPQCLCR

SEQ ID NO: 577 - protein, 36 aa, synthetic construct
  REGION 1..36: note = Description of Artificial Sequence: Synthetic polypeptide
MCMPCFTTEQRMAIICDDCCGGFGRGRCYGPQCLCR

SEQ ID NO: 578 - protein, 36 aa, synthetic construct
  REGION 1..36: note = Description of Artificial Sequence: Synthetic polypeptide
ICIPCFTTDHQIARRCDDCCGGRGRGKCYGPQCICR

SEQ ID NO: 579 - protein, 36 aa, synthetic construct
  REGION 1..36: note = Description of Artificial Sequence: Synthetic polypeptide
ICIPCFTTDHQIARRCDDCCGGRGRGRCYGPQCICR

SEQ ID NO: 580 - protein, 36 aa, synthetic construct
  REGION 1..36: note = Description of Artificial Sequence: Synthetic polypeptide
MCMPCFTTDHRMAENCDICCGGDGRGKCYGPQCLCR

SEQ ID NO: 581 - protein, 36 aa, synthetic construct
  REGION 1..36: note = Description of Artificial Sequence: Synthetic polypeptide
MCMPCFTTDHRMAENCDICCGGDGRGRCYGPQCLCR

SEQ ID NO: 582 - protein, 36 aa, synthetic construct
  REGION 1..36: note = Description of Artificial Sequence: Synthetic polypeptide
MCMPCFTTEQRMAIICDDCCGGFGRGKCYGPQCLCI

SEQ ID NO: 583 - protein, 36 aa, synthetic construct
  REGION 1..36: note = Description of Artificial Sequence: Synthetic polypeptide
MCMPCFTTEQRMAIICDDCCGGFGRGRCYGPQCLCI

SEQ ID NO: 584 - protein, 36 aa, synthetic construct
  REGION 1..36: note = Description of Artificial Sequence: Synthetic polypeptide
ICIPCFTTDHQIARRCDDCCGGRGRGKCYGPQCICI

SEQ ID NO: 585 - protein, 36 aa, synthetic construct
  REGION 1..36: note = Description of Artificial Sequence: Synthetic polypeptide
ICIPCFTTDHQIARRCDDCCGGRGRGRCYGPQCICI

SEQ ID NO: 586 - protein, 36 aa, synthetic construct
  REGION 1..36: note = Description of Artificial Sequence: Synthetic polypeptide
MCMPCFTTDHRMAENCDICCGGDGRGKCYGPQCLCI

SEQ ID NO: 587 - protein, 36 aa, synthetic construct
  REGION 1..36: note = Description of Artificial Sequence: Synthetic polypeptide
MCMPCFTTDHRMAENCDICCGGDGRGRCYGPQCLCI

SEQ ID NO: 588 - protein, 36 aa, synthetic construct
  REGION 1..36: note = Description of Artificial Sequence: Synthetic polypeptide
MCMPCFTTDTQMQEKCDRCCGGGGRGRCWGPQCLCI

SEQ ID NO: 589 - protein, 36 aa, synthetic construct
  REGION 1..36: note = Description of Artificial Sequence: Synthetic polypeptide
MCMPCFTTEQRMAIKCDDCCGGFGRGRCYGPQCLCR

SEQ ID NO: 590 - protein, 36 aa, synthetic construct
  REGION 1..36: note = Description of Artificial Sequence: Synthetic polypeptide
ICIPCFTTDHQIARKCDDCCGGRGRGRCYGPQCICR

SEQ ID NO: 591 - protein, 36 aa, synthetic construct
  REGION 1..36: note = Description of Artificial Sequence: Synthetic polypeptide
MCMPCFTTDHRMAEKCDICCGGDGRGRCYGPQCLCR

SEQ ID NO: 592 - protein, 36 aa, synthetic construct
  REGION 1..36: note = Description of Artificial Sequence: Synthetic polypeptide
MCMPCFTTDTQMQERCDRCCGGKGRGRCWGPQCLCI

SEQ ID NO: 593 - protein, 36 aa, synthetic construct
  REGION 1..36: note = Description of Artificial Sequence: Synthetic polypeptide
MCMPCFTTEQRMAIICDDCCGGKGRGRCYGPQCLCR

SEQ ID NO: 594 - protein, 36 aa, synthetic construct
  REGION 1..36: note = Description of Artificial Sequence: Synthetic polypeptide
ICIPCFTTDHQIARRCDDCCGGKGRGRCYGPQCICR

SEQ ID NO: 595 - protein, 36 aa, synthetic construct
  REGION 1..36: note = Description of Artificial Sequence: Synthetic polypeptide
MCMPCFTTDHRMAENCDICCGGKGRGRCYGPQCLCR

SEQ ID NO: 596 - protein, 36 aa, synthetic construct
  REGION 1..36: note = Description of Artificial Sequence: Synthetic polypeptide
MCMPCFTTHHRMAENCDICCGGDGRGRCYGPQCLCR

SEQ ID NO: 597 - protein, 35 aa, synthetic construct
  REGION 1..35: note = Description of Artificial Sequence: Synthetic polypeptide
MCMPCFTTDTQMQERCDRCCGGGGRGRCWGPQCLC

SEQ ID NO: 598 - protein, 35 aa, synthetic construct
  REGION 1..35: note = Description of Artificial Sequence: Synthetic polypeptide
MCMPCFTTEQRMAIICDDCCGGFGRGRCYGPQCLC

SEQ ID NO: 599 - protein, 35 aa, synthetic construct
  REGION 1..35: note = Description of Artificial Sequence: Synthetic polypeptide
ICIPCFTTDHQIARRCDDCCGGRGRGRCYGPQCIC

SEQ ID NO: 600 - protein, 35 aa, synthetic construct
  REGION 1..35: note = Description of Artificial Sequence: Synthetic polypeptide
MCMPCFTTDHRMAENCDICCGGDGRGRCYGPQCLC

SEQ ID NO: 601 - protein, 36 aa, synthetic construct
  REGION 1..36: note = Description of Artificial Sequence: Synthetic polypeptide
MCMPCFTTDHQMARRCDDCCGGRGRGRCYGPQCLCI

SEQ ID NO: 602 - protein, 36 aa, synthetic construct
  REGION 1..36: note = Description of Artificial Sequence: Synthetic polypeptide
ACAPCFTTDHQAARRCDDCCGGRGRGKCYGPQCLCR

SEQ ID NO: 603 - protein, 36 aa, synthetic construct
  REGION 1..36: note = Description of Artificial Sequence: Synthetic polypeptide
ACAPCFTTDHQAARKCDDCCGGKGRGKCYGPQCLCR

SEQ ID NO: 604 - protein, 36 aa, synthetic construct
  REGION 1..36: note = Description of Artificial Sequence: Synthetic polypeptide
MCMPCFTTHHRMAENCDICCGGDGRGKCYGPQCLCI

SEQ ID NO: 605 - protein, 35 aa, synthetic construct
  REGION 1..35: note = Description of Artificial Sequence: Synthetic polypeptide
MCMPCFTTHHRMAENCDICCGGDGRGKCYGPQCLC

SEQ ID NO: 606 - protein, 35 aa, synthetic construct
  REGION 1..35: note = Description of Artificial Sequence: Synthetic polypeptide
MCMPCFTTDHQMARRCDDCCGGRGRGRCYGPQCLC

SEQ ID NO: 607 - protein, 36 aa, synthetic construct
  REGION 1..36: note = Description of Artificial Sequence: Synthetic polypeptide
MCMPCFTTHHQMAENCDICCGGDGRGKCYGPQCLCR

SEQ ID NO: 608 - protein, 36 aa, synthetic construct
  REGION 1..36: note = Description of Artificial Sequence: Synthetic polypeptide
MCMPCFTTHHRMARNCDICCGGDGRGKCYGPQCLCR

SEQ ID NO: 609 - protein, 36 aa, synthetic construct
  REGION 1..36: note = Description of Artificial Sequence: Synthetic polypeptide
MCMPCFTTHHRMAERCDICCGGDGRGKCYGPQCLCR

SEQ ID NO: 610 - protein, 36 aa, synthetic construct
  REGION 1..36: note = Description of Artificial Sequence: Synthetic polypeptide
MCMPCFTTHHRMAENCDDCCGGDGRGKCYGPQCLCR

SEQ ID NO: 611 - protein, 36 aa, synthetic construct
  REGION 1..36: note = Description of Artificial Sequence: Synthetic polypeptide
RCMPCFTTDHQMARRCDDCCGGRGRGKCYGPQCLCR

SEQ ID NO: 612 - protein, 36 aa, synthetic construct
  REGION 1..36: note = Description of Artificial Sequence: Synthetic polypeptide
ICIPCFTTDHQIARRCDDCCGGRGRGKCYGPQCLCR

SEQ ID NO: 613 - protein, 36 aa, synthetic construct
  REGION 1..36: note = Description of Artificial Sequence: Synthetic polypeptide
MCLPCFTTDHQLARRCDDCCGGRGRGKCYGPQCLCR

SEQ ID NO: 614 - protein, 36 aa, synthetic construct
  REGION 1..36: note = Description of Artificial Sequence: Synthetic polypeptide
MCMPCFTTEHQMARRCEECCGGRGRGKCYGPQCLCR

SEQ ID NO: 615 - protein, 36 aa, synthetic construct
  REGION 1..36: note = Description of Artificial Sequence: Synthetic polypeptide
MCIPCFTTDHQMARRCEECCGGRGRGKCYGPQCLCR

SEQ ID NO: 616 - protein, 36 aa, synthetic construct
  REGION 1..36: note = Description of Artificial Sequence: Synthetic polypeptide
ICIPCFTTDHQMARRCDDCCGGRGDGKCYGPQCLCR

SEQ ID NO: 617 - protein, 36 aa, synthetic construct
  REGION 1..36: note = Description of Artificial Sequence: Synthetic polypeptide
RCMPCFTTDHFMARFCDFCCGGRGRGKCYGPQCLCR

SEQ ID NO: 618 - protein, 36 aa, synthetic construct
  REGION 1..36: note = Description of Artificial Sequence: Synthetic polypeptide
RCMPCFTTDHYMARYCDYCCGGRGRGKCYGPQCLCR

SEQ ID NO: 619 - protein, 36 aa, synthetic construct
  REGION 1..36: note = Description of Artificial Sequence: Synthetic polypeptide
RCMPCFTTDHRMARRCDRCCGGRGRGKCYGPQCLCR

SEQ ID NO: 620 - protein, 36 aa, synthetic construct
  REGION 1..36: note = Description of Artificial Sequence: Synthetic polypeptide
RCMPCFTTDHEMARECDECCGGRGRGKCYGPQCLCR

SEQ ID NO: 621 - protein, 36 aa, synthetic construct
  REGION 1..36: note = Description of Artificial Sequence: Synthetic polypeptide
RCMPCFTTDHHMARHCDHCCGGRGRGKCYGPQCLCR

SEQ ID NO: 622 - protein, 36 aa, synthetic construct
  REGION 1..36: note = Description of Artificial Sequence: Synthetic polypeptide
LCLPCFTTHHRLADQCDICCGGDGRGKCYGPQCLCR

SEQ ID NO: 623 - protein, 36 aa, synthetic construct
  REGION 1..36: note = Description of Artificial Sequence: Synthetic polypeptide
ICIPCFTTEHQIARRCEECCGGRGRGKCYGPQCLCR

SEQ ID NO: 624 - protein, 36 aa, synthetic construct
  REGION 1..36: note = Description of Artificial Sequence: Synthetic polypeptide
MCMPCFTTIYRMAHECDECCGGRGRGKCYGPQCLCR

SEQ ID NO: 625 - protein, 36 aa, synthetic construct
  REGION 1..36: note = Description of Artificial Sequence: Synthetic polypeptide
MCMPCFTTGYRMAEYCDICCGGRGRGKCYGPQCLCR

SEQ ID NO: 626 - protein, 36 aa, synthetic construct
  REGION 1..36: note = Description of Artificial Sequence: Synthetic polypeptide
MCMPCFTTHRRMANTCDACCGGRSRGKCYGPQCLCR

SEQ ID NO: 627 - protein, 36 aa, synthetic construct
  REGION 1..36: note = Description of Artificial Sequence: Synthetic polypeptide
HCMPCFTTDHQMIRRCDDCCGGGSYGKCDGPQCLCF

SEQ ID NO: 628 - protein, 36 aa, synthetic construct
  REGION 1..36: note = Description of Artificial Sequence: Synthetic polypeptide
DCMPCFTTDHRMADHCDICCGGDDRGKCYGPQCLCR

SEQ ID NO: 629 - protein, 36 aa, synthetic construct
  REGION 1..36: note = Description of Artificial Sequence: Synthetic polypeptide
MCMPCFTTDHEMERRCDDCCGIGGGGKCHGPQCLCG

SEQ ID NO: 630 - protein, 36 aa, synthetic construct
  REGION 1..36: note = Description of Artificial Sequence: Synthetic polypeptide
MCMPCFTTSEQMFRRCDDCCGGWGDGKCNGPHCLCR

SEQ ID NO: 631 - protein, 34 aa, synthetic construct
  REGION 1..34: note = Description of Artificial Sequence: Synthetic polypeptide
CGPCFTTDHQMEQKCAECCGGIGKCYGPQCLCNR

SEQ ID NO: 632 - protein, 38 aa, synthetic construct
  REGION 1..38: note = Description of Artificial Sequence: Synthetic polypeptide
RCGPCFTTDPQTQAKCSECCGRKGGVCKGPQCICGIQY

SEQ ID NO: 633 - protein, 35 aa, synthetic construct
  REGION 1..35: note = Description of Artificial Sequence: Synthetic polypeptide
MCMPCFTTDPNMAKKCRDCCGGNGKCFGPQCLCNR

SEQ ID NO: 634 - protein, 34 aa, synthetic construct
  REGION 1..34: note = Description of Artificial Sequence: Synthetic polypeptide
MCMPCFTTDHNMAKKCNDCCGGYGKCFGPQCLCR

SEQ ID NO: 635 - protein, 36 aa, synthetic construct
  REGION 1..36: note = Description of Artificial Sequence: Synthetic polypeptide
RCPPCFTTNPNMEADCRKCCGGRGYCASYQCICPGG

SEQ ID NO: 636 - protein, 35 aa, synthetic construct
  REGION 1..35: note = Description of Artificial Sequence: Synthetic polypeptide
MCMPCFTTDPNMANKCRDCCGGGKKCFGPQCLCNR

SEQ ID NO: 637 - protein, 62 aa, synthetic construct
  REGION 1..62: note = Description of Artificial Sequence: Synthetic polypeptide
MKFLYGVILIALFLTVMTATLSEARCGPCFTTDPQTQAKCSECCGRKGGVCKGPQCICGIQY

SEQ ID NO: 638 - protein, 36 aa, synthetic construct
  REGION 1..36: note = Description of Artificial Sequence: Synthetic polypeptide
MCMPCFTTRPDMAQQCRACCKGRGKCFGPQCLCGYD

SEQ ID NO: 639 - protein, 60 aa, synthetic construct
  REGION 1..60: note = Description of Artificial Sequence: Synthetic polypeptide
MKFLYGIVFIALFLTVMTATLSDAMCMPCFTTDHNMAKKCRDCCGGNGKCFGPQCLCNRG

SEQ ID NO: 640 - protein, 35 aa, synthetic construct
  REGION 1..35: note = Description of Artificial Sequence: Synthetic polypeptide
MCMPCFTTDHNMAKKCRDCCGGNGKCFGPQCLCNR

SEQ ID NO: 641 - protein, 60 aa, synthetic construct
  REGION 1..60: note = Description of Artificial Sequence: Synthetic polypeptide
MKFLYGIVFITLFLTVMIATHTEAMCMPCFTTRPNMAQQCRDCCRGRGKCFGPQCLCGYD

SEQ ID NO: 642 - protein, 60 aa, synthetic construct
  REGION 1..60: note = Description of Artificial Sequence: Synthetic polypeptide
MKFLYGIVFIALFLTVMIATHTEAMCMPCFTTRPNMAQQCRDCCRGRGKCFGPQCLCGYD

SEQ ID NO: 643 - protein, 35 aa, synthetic construct
  REGION 1..35: note = Description of Artificial Sequence: Synthetic polypeptide
RCKPCFTTDPQMSKKCADCCGGKGKGKCYGPQCLC

SEQ ID NO: 644 - protein, 61 aa, synthetic construct
  REGION 1..61: note = Description of Artificial Sequence: Synthetic polypeptide
MKFLYGIVFITLFLTVMIATHTEAAMCMPCFTTNLNMEQECRDCCGGTGRCFGPQCLCGYD

SEQ ID NO: 645 - protein, 38 aa, synthetic construct
  REGION 1..38: note = Description of Artificial Sequence: Synthetic polypeptide
RCSPCFTTDQQMTKKCYDCCGGKGKGKCYGPQCICAPY

SEQ ID NO: 646 - protein, 35 aa, synthetic construct
  REGION 1..35: note = Description of Artificial Sequence: Synthetic polypeptide
CGPCFTTDPYTESKCATCCGGRGKCVGPQCLCNRI

SEQ ID NO: 647 - protein, 39 aa, synthetic construct
  REGION 1..39: note = Description of Artificial Sequence: Synthetic polypeptide
TEAMCMPCFTTDHNMAKKCRDCCGGNGKCFGYQCLCNRG

SEQ ID NO: 648 - protein, 59 aa, synthetic construct
  REGION 1..59: note = Description of Artificial Sequence: Synthetic polypeptide
MKFLYGIVFIALFLTVMFATQTDGCGPCFTTDANMARKCRECCGGIGKCFGPQCLCNRI

SEQ ID NO: 649 - protein, 59 aa, synthetic construct
  REGION 1..59: note = Description of Artificial Sequence: Synthetic polypeptide
MKFLYGIVFIALFLTVMFATQTDGCGPCFTTDANMARKCRECCGGNGKCFGPQCLCNRE

SEQ ID NO: 650 - protein, 60 aa, synthetic construct
  REGION 1..60: note = Description of Artificial Sequence: Synthetic polypeptide
MKFLYGTILIAFFLTVMIATHSEARCPPCFTTNPNMEADCRKCCGGRGYCASYQCICPGG

SEQ ID NO: 651 - protein, 39 aa, synthetic construct
  REGION 1..39: note = Description of Artificial Sequence: Synthetic polypeptide
TEAMCMPCFTTRPDMAQQCRDCCGGNGKCFGYQCLCNRG

SEQ ID NO: 652 - protein, 60 aa, synthetic construct
  REGION 1..60: note = Description of Artificial Sequence: Synthetic polypeptide
MKFLYGIVFIALFLTVMIATLTEAMCMPCFTTRPDMAQQCRDCCGGNGKCFGYQCLCNRG

SEQ ID NO: 653 - protein, 60 aa, synthetic construct
  REGION 1..60: note = Description of Artificial Sequence: Synthetic polypeptide
MKFLYGIVFIALFLTVMIATHTEAMCMPCFTTRPDMAQQCRDCCGGNGKCFGYQCLCNRG

SEQ ID NO: 654 - protein, 61 aa, synthetic construct
  REGION 1..61: note = Description of Artificial Sequence: Synthetic polypeptide
MKFLYGIILIALFLTVMIATHSEARCPNCFTTNPNAEADCKKCCGNRWGKCAGYQCVCPMK

SEQ ID NO: 655 - protein, 67 aa, synthetic construct
  REGION 1..67: note = Description of Artificial Sequence: Synthetic polypeptide
MKFLYGIVFIALFLTGMIATHTEAMCMPCFTTRPDMAQQCRDCCGGNGKCFGYQCLCNRGRIVIMYT

SEQ ID NO: 656 - protein, 35 aa, synthetic construct
  REGION 1..35: note = Description of Artificial Sequence: Synthetic polypeptide
MCMPCFTTRPGMAQQCRDCCGGNGKCFGYQCLCNR

SEQ ID NO: 657 - protein, 35 aa, synthetic construct
  REGION 1..35: note = Description of Artificial Sequence: Synthetic polypeptide
MCIPCFTTNPNMAAKCNACCGSRRGSCRGPQCICR

SEQ ID NO: 658 - protein, 35 aa, synthetic construct
  REGION 1..35: note = Description of Artificial Sequence: Synthetic polypeptide
MCIPCFTTNPNMAAKCNACCGSRRGSCRGPQCICN

SEQ ID NO: 659 - protein, 34 aa, synthetic construct
  REGION 1..34: note = Description of Artificial Sequence: Synthetic polypeptide
MCIPCFTTNPNMAAKCNACCGGNGSCRGPQCICN

SEQ ID NO: 660 - protein, 36 aa, synthetic construct
  REGION 1..36: note = Description of Artificial Sequence: Synthetic polypeptide
MCIPCFTTNPNMAAKCNACCGSRGRGSCRGPQCICN

SEQ ID NO: 661 - protein, 36 aa, synthetic construct
  REGION 1..36: note = Description of Artificial Sequence: Synthetic polypeptide
MCIPCFTTNPNMAAKCNACCGSRGRGKCRGPQCICN

SEQ ID NO: 662 - protein, 35 aa, synthetic construct
  REGION 1..35: note = Description of Artificial Sequence: Synthetic polypeptide
MCIPCFTTDHQMAAKCNACCGSRRGSCRGPQCICN

SEQ ID NO: 663 - protein, 35 aa, synthetic construct
  REGION 1..35: note = Description of Artificial Sequence: Synthetic polypeptide
MCIPCFTTNHQMAAKCNACCGSRRGSCRGPQCICN

SEQ ID NO: 664 - protein, 36 aa, synthetic construct
  REGION 1..36: note = Description of Artificial Sequence: Synthetic polypeptide
MCIPCFTTNPNMARKCNACCGSRGRGSCRGPQCICN

SEQ ID NO: 665 - protein, 36 aa, synthetic construct
  REGION 1..36: note = Description of Artificial Sequence: Synthetic polypeptide
MCIPCFTTNPNMAAKCNACCGGKGRGSCRGPQCICN

SEQ ID NO: 666 - protein, 35 aa, synthetic construct
  REGION 1..35: note = Description of Artificial Sequence: Synthetic polypeptide
MCIPCFTTNPNMAAKCNACCGSRRGSCFGPQCICN

SEQ ID NO: 667 - protein, 36 aa, synthetic construct
  REGION 1..36: note = Description of Artificial Sequence: Synthetic polypeptide
MCIPCFTTNPNMAAKCNACCGSRGRGKCFGPQCICN

SEQ ID NO: 668 - protein, 36 aa, synthetic construct
  REGION 1..36: note = Description of Artificial Sequence: Synthetic polypeptide
MCIPCFTTNPNMAAKCNACCGSRGRGSCFGPQCICN

SEQ ID NO: 669 - protein, 36 aa, synthetic construct
  REGION 1..36: note = Description of Artificial Sequence: Synthetic polypeptide
MCIPCFTTNPNMAAKCNACCGSRGRGSCYGPQCICN

SEQ ID NO: 670 - protein, 35 aa, synthetic construct
  REGION 1..35: note = Description of Artificial Sequence: Synthetic polypeptide
MCIPCFTTNPNMAAKCDACCGSRRGSCRGPQCICN

SEQ ID NO: 671 - protein, 35 aa, synthetic construct
  REGION 1..35: note = Description of Artificial Sequence: Synthetic polypeptide
MCIPCFTTNHQMAAKCDACCGSRRGSCRGPQCICN

SEQ ID NO: 672 - protein, 36 aa, synthetic construct
  REGION 1..36: note = Description of Artificial Sequence: Synthetic polypeptide
MCIPCFTTNHNMAAKCDACCGGRGRGSCRGPQCICN

SEQ ID NO: 673 - protein, 36 aa, synthetic construct
  REGION 1..36: note = Description of Artificial Sequence: Synthetic polypeptide
MCIPCFTTNPNMAAKCDACCGSRGRGSCRGPQCICN

SEQ ID NO: 674 - protein, 36 aa, synthetic construct
  REGION 1..36: note = Description of Artificial Sequence: Synthetic polypeptide
MCIPCFTTNPNMAAKCDACCGGKGRGSCRGPQCICN

SEQ ID NO: 675 - protein, 36 aa, synthetic construct
  REGION 1..36: note = Description of Artificial Sequence: Synthetic polypeptide
MCIPCFTTNHNMAAKCDACCGSRGRGSCRGPQCICN

SEQ ID NO: 676 - protein, 34 aa, synthetic construct
  REGION 1..34: note = Description of Artificial Sequence: Synthetic polypeptide
MCIPCFTTNPNMAAKCRDCCGGRGSCRGPQCICN

SEQ ID NO: 677 - protein, 36 aa, synthetic construct
  REGION 1..36: note = Description of Artificial Sequence: Synthetic polypeptide
MCMPCFTTNPNMAAKCDDCCGSRGRGSCRGPQCICN

SEQ ID NO: 678 - protein, 34 aa, synthetic construct
  REGION 1..34: note = Description of Artificial Sequence: Synthetic polypeptide
MCIPCFTTNPNMAARCNACCGSRRGSCRGPQCIC

SEQ ID NO: 679 - protein, 35 aa, synthetic construct
  REGION 1..35: note = Description of Artificial Sequence: Synthetic polypeptide
MCIPCFTTNPNMAAKCNACCGSRRGSCRGPQCICI

SEQ ID NO: 680 - protein, 36 aa, synthetic construct
  REGION 1..36: note = Description of Artificial Sequence: Synthetic polypeptide
MCMPCFTTDHQMARACDDCCGGKGRGKCYGPQCLCR

SEQ ID NO: 681 - protein, 36 aa, synthetic construct
  REGION 1..36: note = Description of Artificial Sequence: Synthetic polypeptide
MCMPCFTTDHQMARRCDDCCGGKGRGKCYGPQCLCR

SEQ ID NO: 682 - protein, 36 aa, synthetic construct
  REGION 1..36: note = Description of Artificial Sequence: Synthetic polypeptide
MCMPCFTTDHQMARKCDDCCGGAGRGKCYGPQCLCR

SEQ ID NO: 683 - protein, 36 aa, synthetic construct
  REGION 1..36: note = Description of Artificial Sequence: Synthetic polypeptide
MCMPCFTTDHQMARACDDCCGGAGRGKCYGPQCLCR

SEQ ID NO: 684 - protein, 36 aa, synthetic construct
  REGION 1..36: note = Description of Artificial Sequence: Synthetic polypeptide
MCMPCFTTDHQMARRCDDCCGGAGRGKCYGPQCLCR

SEQ ID NO: 685 - protein, 36 aa, synthetic construct
  REGION 1..36: note = Description of Artificial Sequence: Synthetic polypeptide
MCMPCFTTDHQMARKCDDCCGGRGRGKCYGPQCLCR

SEQ ID NO: 686 - protein, 36 aa, synthetic construct
  REGION 1..36: note = Description of Artificial Sequence: Synthetic polypeptide
MCMPCFTTDHQMARACDDCCGGRGRGKCYGPQCLCR

SEQ ID NO: 687 - protein, 36 aa, synthetic construct
  REGION 1..36: note = Description of Artificial Sequence: Synthetic polypeptide
MCMPCFTTDHQMARKCDDCCGGKGRGACYGPQCLCR

SEQ ID NO: 688 - protein, 36 aa, synthetic construct
  REGION 1..36: note = Description of Artificial Sequence: Synthetic polypeptide
MCMPCFTTDHQMARACDDCCGGKGRGACYGPQCLCR

SEQ ID NO: 689 - protein, 36 aa, synthetic construct
  REGION 1..36: note = Description of Artificial Sequence: Synthetic polypeptide
MCMPCFTTDHQMARRCDDCCGGKGRGACYGPQCLCR

SEQ ID NO: 690 - protein, 36 aa, synthetic construct
  REGION 1..36: note = Description of Artificial Sequence: Synthetic polypeptide
MCMPCFTTDHQMARKCDDCCGGAGRGACYGPQCLCR

SEQ ID NO: 691 - protein, 36 aa, synthetic construct
  REGION 1..36: note = Description of Artificial Sequence: Synthetic polypeptide
MCMPCFTTDHQMARACDDCCGGAGRGACYGPQCLCR

SEQ ID NO: 692 - protein, 36 aa, synthetic construct
  REGION 1..36: note = Description of Artificial Sequence: Synthetic polypeptide
MCMPCFTTDHQMARRCDDCCGGAGRGACYGPQCLCR

SEQ ID NO: 693 - protein, 36 aa, synthetic construct
  REGION 1..36: note = Description of Artificial Sequence: Synthetic polypeptide
MCMPCFTTDHQMARKCDDCCGGRGRGACYGPQCLCR

SEQ ID NO: 694 - protein, 36 aa, synthetic construct
  REGION 1..36: note = Description of Artificial Sequence: Synthetic polypeptide
MCMPCFTTDHQMARACDDCCGGRGRGACYGPQCLCR

SEQ ID NO: 695 - protein, 36 aa, synthetic construct
  REGION 1..36: note = Description of Artificial Sequence: Synthetic polypeptide
MCMPCFTTDHQMARRCDDCCGGRGRGACYGPQCLCR

SEQ ID NO: 696 - protein, 36 aa, synthetic construct
  REGION 1..36: note = Description of Artificial Sequence: Synthetic polypeptide
MCMPCFTTDHQMARKCDDCCGGKGRGRCYGPQCLCR

SEQ ID NO: 697 - protein, 36 aa, synthetic construct
  REGION 1..36: note = Description of Artificial Sequence: Synthetic polypeptide
MCMPCFTTDHQMARACDDCCGGKGRGRCYGPQCLCR

SEQ ID NO: 698 - protein, 36 aa, synthetic construct
  REGION 1..36: note = Description of Artificial Sequence: Synthetic polypeptide
MCMPCFTTDHQMARKCDDCCGGAGRGRCYGPQCLCR

SEQ ID NO: 699 - protein, 36 aa, synthetic construct
  REGION 1..36: note = Description of Artificial Sequence: Synthetic polypeptide
MCMPCFTTDHQMARACDDCCGGAGRGRCYGPQCLCR

SEQ ID NO: 700 - protein, 36 aa, synthetic construct
  REGION 1..36: note = Description of Artificial Sequence: Synthetic polypeptide
MCMPCFTTDHQMARRCDDCCGGAGRGRCYGPQCLCR

SEQ ID NO: 701 - protein, 36 aa, synthetic construct
  REGION 1..36: note = Description of Artificial Sequence: Synthetic polypeptide
MCMPCFTTDHQMARACDDCCGGRGRGRCYGPQCLCR

SEQ ID NO: 702 - protein, 36 aa, synthetic construct
  REGION 1..36: note = Description of Artificial Sequence: Synthetic polypeptide
KCMPCFTTDHQMARRCDDCCGGRGRGRCYGPQCLCR

SEQ ID NO: 703 - protein, 36 aa, synthetic construct
  REGION 1..36: note = Description of Artificial Sequence: Synthetic polypeptide
ACAPCFTTDHQAARRCDDCCGGRGRGRCYGPQCLCR

SEQ ID NO: 704 - protein, 36 aa, synthetic construct
  REGION 1..36: note = Description of Artificial Sequence: Synthetic polypeptide
KCAPCFTTDHQAARRCDDCCGGRGRGRCYGPQCLCR

SEQ ID NO: 705 - protein, 36 aa, synthetic construct
  REGION 1..36: note = Description of Artificial Sequence: Synthetic polypeptide
  SITE 15: note = MOD_RES - Citrulline
  SITE 23: note = MOD_RES - Citrulline
MCMPCFTTDHQMARXCDDCCGGXGRGKCYGPQCLCR

SEQ ID NO: 706 - protein, 36 aa, synthetic construct
  REGION 1..36: note = Description of Artificial Sequence: Synthetic polypeptide
  SITE 15: note = MOD_RES - Citrulline
  SITE 23: note = MOD_RES - Citrulline
  SITE 27: note = MOD_RES - Citrulline
MCMPCFTTDHQMARXCDDCCGGXGRGXCYGPQCLCR

SEQ ID NO: 707 - protein, 36 aa, synthetic construct
  REGION 1..36: note = Description of Artificial Sequence: Synthetic polypeptide
  SITE 15: note = MOD_RES - Citrulline
  SITE 23: note = MOD_RES - Citrulline
  SITE 27: note = MOD_RES - Citrulline
KCMPCFTTDHQMARXCDDCCGGXGRGXCYGPQCLCR

SEQ ID NO: 708 - protein, 36 aa, synthetic construct
  REGION 1..36: note = Description of Artificial Sequence: Synthetic polypeptide
  SITE 15: note = MOD_RES - Citrulline
  SITE 23: note = MOD_RES - Citrulline
ACAPCFTTDHQAARXCDDCCGGXGRGKCYGPQCLCR

SEQ ID NO: 709 - protein, 36 aa, synthetic construct
  REGION 1..36: note = Description of Artificial Sequence: Synthetic polypeptide
  SITE 15: note = MOD_RES - Citrulline
  SITE 23: note = MOD_RES - Citrulline
  SITE 27: note = MOD_RES - Citrulline
ACAPCFTTDHQAARXCDDCCGGXGRGXCYGPQCLCR

SEQ ID NO: 710 - protein, 36 aa, synthetic construct
  REGION 1..36: note = Description of Artificial Sequence: Synthetic polypeptide
  SITE 15: note = MOD_RES - Citrulline
  SITE 23: note = MOD_RES - Citrulline
  SITE 27: note = MOD_RES - Citrulline
KCAPCFTTDHQAARXCDDCCGGXGRGXCYGPQCLCR

SEQ ID NO: 711 - protein, 43 aa, synthetic construct
  REGION 1..43: note = Description of Artificial Sequence: Synthetic polypeptide
MCMPCFTTDHQMARKCDDCCGGKGRGKCYGPQCLCRGAGAAGG

SEQ ID NO: 712 - protein, 43 aa, synthetic construct
  REGION 1..43: note = Description of Artificial Sequence: Synthetic polypeptide
MCMPCFTTDHQMARACDDCCGGKGRGKCYGPQCLCRGAGAAGG

SEQ ID NO: 713 - protein, 43 aa, synthetic construct
  REGION 1..43: note = Description of Artificial Sequence: Synthetic polypeptide
MCMPCFTTDHQMARRCDDCCGGKGRGKCYGPQCLCRGAGAAGG

SEQ ID NO: 714 - protein, 43 aa, synthetic construct
  REGION 1..43: note = Description of Artificial Sequence: Synthetic polypeptide
MCMPCFTTDHQMARKCDDCCGGAGRGKCYGPQCLCRGAGAAGG

SEQ ID NO: 715 - protein, 43 aa, synthetic construct
  REGION 1..43: note = Description of Artificial Sequence: Synthetic polypeptide
MCMPCFTTDHQMARACDDCCGGAGRGKCYGPQCLCRGAGAAGG

SEQ ID NO: 716 - protein, 43 aa, synthetic construct
  REGION 1..43: note = Description of Artificial Sequence: Synthetic polypeptide
MCMPCFTTDHQMARRCDDCCGGAGRGKCYGPQCLCRGAGAAGG

SEQ ID NO: 717 - protein, 43 aa, synthetic construct
  REGION 1..43: note = Description of Artificial Sequence: Synthetic polypeptide
MCMPCFTTDHQMARKCDDCCGGRGRGKCYGPQCLCRGAGAAGG

SEQ ID NO: 718 - protein, 43 aa, synthetic construct
  REGION 1..43: note = Description of Artificial Sequence: Synthetic polypeptide
MCMPCFTTDHQMARACDDCCGGRGRGKCYGPQCLCRGAGAAGG

SEQ ID NO: 719 - protein, 43 aa, synthetic construct
  REGION 1..43: note = Description of Artificial Sequence: Synthetic polypeptide
MCMPCFTTDHQMARRCDDCCGGRGRGKCYGPQCLCRGAGAAGG

SEQ ID NO: 720 - protein, 43 aa, synthetic construct
  REGION 1..43: note = Description of Artificial Sequence: Synthetic polypeptide
MCMPCFTTDHQMARKCDDCCGGKGRGACYGPQCLCRGAGAAGG

SEQ ID NO: 721 - protein, 43 aa, synthetic construct
  REGION 1..43: note = Description of Artificial Sequence: Synthetic polypeptide
MCMPCFTTDHQMARACDDCCGGKGRGACYGPQCLCRGAGAAGG

SEQ ID NO: 722 - protein, 43 aa, synthetic construct
  REGION 1..43: note = Description of Artificial Sequence: Synthetic polypeptide
MCMPCFTTDHQMARRCDDCCGGKGRGACYGPQCLCRGAGAAGG

SEQ ID NO: 723 - protein, 43 aa, synthetic construct
  REGION 1..43: note = Description of Artificial Sequence: Synthetic polypeptide
MCMPCFTTDHQMARKCDDCCGGAGRGACYGPQCLCRGAGAAGG

SEQ ID NO: 724 - protein, 43 aa, synthetic construct
  REGION 1..43: note = Description of Artificial Sequence: Synthetic polypeptide
MCMPCFTTDHQMARACDDCCGGAGRGACYGPQCLCRGAGAAGG

SEQ ID NO: 725 - protein, 43 aa, synthetic construct
  REGION 1..43: note = Description of Artificial Sequence: Synthetic polypeptide
MCMPCFTTDHQMARRCDDCCGGAGRGACYGPQCLCRGAGAAGG

SEQ ID NO: 726 - protein, 43 aa, synthetic construct
  REGION 1..43: note = Description of Artificial Sequence: Synthetic polypeptide
MCMPCFTTDHQMARKCDDCCGGRGRGACYGPQCLCRGAGAAGG

SEQ ID NO: 727 - protein, 43 aa, synthetic construct
  REGION 1..43: note = Description of Artificial Sequence: Synthetic polypeptide
MCMPCFTTDHQMARACDDCCGGRGRGACYGPQCLCRGAGAAGG

SEQ ID NO: 728 - protein, 43 aa, synthetic construct
  REGION 1..43: note = Description of Artificial Sequence: Synthetic polypeptide
MCMPCFTTDHQMARRCDDCCGGRGRGACYGPQCLCRGAGAAGG

SEQ ID NO: 729 - protein, 43 aa, synthetic construct
  REGION 1..43: note = Description of Artificial Sequence: Synthetic polypeptide
MCMPCFTTDHQMARKCDDCCGGKGRGRCYGPQCLCRGAGAAGG

SEQ ID NO: 730 - protein, 43 aa, synthetic construct
  REGION 1..43: note = Description of Artificial Sequence: Synthetic polypeptide
MCMPCFTTDHQMARACDDCCGGKGRGRCYGPQCLCRGAGAAGG

SEQ ID NO: 731 - protein, 43 aa, synthetic construct
  REGION 1..43: note = Description of Artificial Sequence: Synthetic polypeptide
MCMPCFTTDHQMARRCDDCCGGKGRGRCYGPQCLCRGAGAAGG

SEQ ID NO: 732 - protein, 43 aa, synthetic construct
  REGION 1..43: note = Description of Artificial Sequence: Synthetic polypeptide
MCMPCFTTDHQMARKCDDCCGGAGRGRCYGPQCLCRGAGAAGG

SEQ ID NO: 733 - protein, 43 aa, synthetic construct
  REGION 1..43: note = Description of Artificial Sequence: Synthetic polypeptide
MCMPCFTTDHQMARACDDCCGGAGRGRCYGPQCLCRGAGAAGG

SEQ ID NO: 734 - protein, 43 aa, synthetic construct
  REGION 1..43: note = Description of Artificial Sequence: Synthetic polypeptide
MCMPCFTTDHQMARRCDDCCGGAGRGRCYGPQCLCRGAGAAGG

SEQ ID NO: 735 - protein, 43 aa, synthetic construct
  REGION 1..43: note = Description of Artificial Sequence: Synthetic polypeptide
MCMPCFTTDHQMARKCDDCCGGRGRGRCYGPQCLCRGAGAAGG

SEQ ID NO: 736 - protein, 43 aa, synthetic construct
  REGION 1..43: note = Description of Artificial Sequence: Synthetic polypeptide
MCMPCFTTDHQMARACDDCCGGRGRGRCYGPQCLCRGAGAAGG

SEQ ID NO: 737 - protein, 43 aa, synthetic construct
  REGION 1..43: note = Description of Artificial Sequence: Synthetic polypeptide
MCMPCFTTDHQMARRCDDCCGGRGRGRCYGPQCLCRGAGAAGG

SEQ ID NO: 738 - protein, 43 aa, synthetic construct
  REGION 1..43: note = Description of Artificial Sequence: Synthetic polypeptide
KCMPCFTTDHQMARRCDDCCGGRGRGRCYGPQCLCRGAGAAGG

SEQ ID NO: 739 - protein, 43 aa, synthetic construct
  REGION 1..43: note = Description of Artificial Sequence: Synthetic polypeptide
ACAPCFTTDHQAARRCDDCCGGRGRGRCYGPQCLCRGAGAAGG

SEQ ID NO: 740 - protein, 43 aa, synthetic construct
  REGION 1..43: note = Description of Artificial Sequence: Synthetic polypeptide
KCAPCFTTDHQAARRCDDCCGGRGRGRCYGPQCLCRGAGAAGG

SEQ ID NO: 741 - protein, 43 aa, synthetic construct
  REGION 1..43: note = Description of Artificial Sequence: Synthetic polypeptide
  SITE 15: note = MOD_RES - Citrulline
  SITE 23: note = MOD_RES - Citrulline
MCMPCFTTDHQMARXCDDCCGGXGRGKCYGPQCLCRGAGAAGG

SEQ ID NO: 742 - protein, 43 aa, synthetic construct
  REGION 1..43: note = Description of Artificial Sequence: Synthetic polypeptide
  SITE 15: note = MOD_RES - Citrulline
  SITE 23: note = MOD_RES - Citrulline
  SITE 27: note = MOD_RES - Citrulline
MCMPCFTTDHQMARXCDDCCGGXGRGXCYGPQCLCRGAGAAGG

SEQ ID NO: 743 - protein, 43 aa, synthetic construct
  REGION 1..43: note = Description of Artificial Sequence: Synthetic polypeptide
  SITE 15: note = MOD_RES - Citrulline
  SITE 23: note = MOD_RES - Citrulline
  SITE 27: note = MOD_RES - Citrulline
KCMPCFTTDHQMARXCDDCCGGXGRGXCYGPQCLCRGAGAAGG

SEQ ID NO: 744 - protein, 43 aa, synthetic construct
  REGION 1..43: note = Description of Artificial Sequence: Synthetic polypeptide
  SITE 15: note = MOD_RES - Citrulline
  SITE 23: note = MOD_RES - Citrulline
ACAPCFTTDHQAARXCDDCCGGXGRGKCYGPQCLCRGAGAAGG

SEQ ID NO: 745 - protein, 43 aa, synthetic construct
  REGION 1..43: note = Description of Artificial Sequence: Synthetic polypeptide
  SITE 15: note = MOD_RES - Citrulline
  SITE 23: note = MOD_RES - Citrulline
  SITE 27: note = MOD_RES - Citrulline
ACAPCFTTDHQAARXCDDCCGGXGRGXCYGPQCLCRGAGAAGG

SEQ ID NO: 746 - protein, 43 aa, synthetic construct
  REGION 1..43: note = Description of Artificial Sequence: Synthetic polypeptide
  SITE 15: note = MOD_RES - Citrulline
  SITE 23: note = MOD_RES - Citrulline
  SITE 27: note = MOD_RES - Citrulline
KCAPCFTTDHQAARXCDDCCGGXGRGXCYGPQCLCRGAGAAGG

SEQ ID NO: 747 - protein, 36 aa, synthetic construct
  REGION 1..36: note = Description of Artificial Sequence: Synthetic polypeptide
MCMPCFTTDHQMVRKCDDCCGGKGRGKCYGPQCLCR

SEQ ID NO: 748 - protein, 36 aa, synthetic construct
  REGION 1..36: note = Description of Artificial Sequence: Synthetic polypeptide
MCMPCFTTDHQMVRVCDDCCGGKGRGKCYGPQCLCR

SEQ ID NO: 749 - protein, 36 aa, synthetic construct
  REGION 1..36: note = Description of Artificial Sequence: Synthetic polypeptide
MCMPCFTTDHQMVRRCDDCCGGKGRGKCYGPQCLCR

SEQ ID NO: 750 - protein, 36 aa, synthetic construct
  REGION 1..36: note = Description of Artificial Sequence: Synthetic polypeptide
MCMPCFTTDHQMVRKCDDCCGGVGRGKCYGPQCLCR

SEQ ID NO: 751 - protein, 36 aa, synthetic construct
  REGION 1..36: note = Description of Artificial Sequence: Synthetic polypeptide
MCMPCFTTDHQMVRVCDDCCGGVGRGKCYGPQCLCR

SEQ ID NO: 752 - protein, 36 aa, synthetic construct
  REGION 1..36: note = Description of Artificial Sequence: Synthetic polypeptide
MCMPCFTTDHQMVRRCDDCCGGVGRGKCYGPQCLCR

SEQ ID NO: 753 - protein, 36 aa, synthetic construct
  REGION 1..36: note = Description of Artificial Sequence: Synthetic polypeptide
MCMPCFTTDHQMVRKCDDCCGGRGRGKCYGPQCLCR

SEQ ID NO: 754 - protein, 36 aa, synthetic construct
  REGION 1..36: note = Description of Artificial Sequence: Synthetic polypeptide
MCMPCFTTDHQMVRVCDDCCGGRGRGKCYGPQCLCR

SEQ ID NO: 755 - protein, 36 aa, synthetic construct
  REGION 1..36: note = Description of Artificial Sequence: Synthetic polypeptide
MCMPCFTTDHQMVRRCDDCCGGRGRGKCYGPQCLCR

SEQ ID NO: 756 - protein, 36 aa, synthetic construct
  REGION 1..36: note = Description of Artificial Sequence: Synthetic polypeptide
MCMPCFTTDHQMVRKCDDCCGGKGRGVCYGPQCLCR

SEQ ID NO: 757 - protein, 36 aa, synthetic construct
  REGION 1..36: note = Description of Artificial Sequence: Synthetic polypeptide
MCMPCFTTDHQMVRVCDDCCGGKGRGVCYGPQCLCR

SEQ ID NO: 758 - protein, 36 aa, synthetic construct
  REGION 1..36: note = Description of Artificial Sequence: Synthetic polypeptide
MCMPCFTTDHQMVRRCDDCCGGKGRGVCYGPQCLCR

SEQ ID NO: 759 - protein, 36 aa, synthetic construct
  REGION 1..36: note = Description of Artificial Sequence: Synthetic polypeptide
MCMPCFTTDHQMVRKCDDCCGGVGRGVCYGPQCLCR

SEQ ID NO: 760 - protein, 36 aa, synthetic construct
  REGION 1..36: note = Description of Artificial Sequence: Synthetic polypeptide
MCMPCFTTDHQMVRVCDDCCGGVGRGVCYGPQCLCR

SEQ ID NO: 761 - protein, 36 aa, synthetic construct
  REGION 1..36: note = Description of Artificial Sequence: Synthetic polypeptide
MCMPCFTTDHQMVRRCDDCCGGVGRGVCYGPQCLCR

SEQ ID NO: 762 - protein, 36 aa, synthetic construct
  REGION 1..36: note = Description of Artificial Sequence: Synthetic polypeptide
MCMPCFTTDHQMVRKCDDCCGGRGRGVCYGPQCLCR

SEQ ID NO: 763 - protein, 36 aa, synthetic construct
  REGION 1..36: note = Description of Artificial Sequence: Synthetic polypeptide
MCMPCFTTDHQMVRVCDDCCGGRGRGVCYGPQCLCR

SEQ ID NO: 764 - protein, 36 aa, synthetic construct
  REGION 1..36: note = Description of Artificial Sequence: Synthetic polypeptide
MCMPCFTTDHQMVRRCDDCCGGRGRGVCYGPQCLCR

SEQ ID NO: 765 - protein, 36 aa, synthetic construct
  REGION 1..36: note = Description of Artificial Sequence: Synthetic polypeptide
MCMPCFTTDHQMVRKCDDCCGGKGRGRCYGPQCLCR

SEQ ID NO: 766 - protein, 36 aa, synthetic construct
  REGION 1..36: note = Description of Artificial Sequence: Synthetic polypeptide
MCMPCFTTDHQMVRVCDDCCGGKGRGRCYGPQCLCR

SEQ ID NO: 767 - protein, 36 aa, synthetic construct
  REGION 1..36: note = Description of Artificial Sequence: Synthetic polypeptide
MCMPCFTTDHQMVRRCDDCCGGKGRGRCYGPQCLCR

SEQ ID NO: 768 - protein, 36 aa, synthetic construct
  REGION 1..36: note = Description of Artificial Sequence: Synthetic polypeptide
MCMPCFTTDHQMVRKCDDCCGGVGRGRCYGPQCLCR

SEQ ID NO: 769 - protein, 36 aa, synthetic construct
  REGION 1..36: note = Description of Artificial Sequence: Synthetic polypeptide
MCMPCFTTDHQMVRVCDDCCGGVGRGRCYGPQCLCR

SEQ ID NO: 770 - protein, 36 aa, synthetic construct
  REGION 1..36: note = Description of Artificial Sequence: Synthetic polypeptide
MCMPCFTTDHQMVRRCDDCCGGVGRGRCYGPQCLCR

SEQ ID NO: 771 - protein, 36 aa, synthetic construct
  REGION 1..36: note = Description of Artificial Sequence: Synthetic polypeptide
MCMPCFTTDHQMVRKCDDCCGGRGRGRCYGPQCLCR

SEQ ID NO: 772 - protein, 36 aa, synthetic construct
  REGION 1..36: note = Description of Artificial Sequence: Synthetic polypeptide
MCMPCFTTDHQMVRVCDDCCGGRGRGRCYGPQCLCR

SEQ ID NO: 773 - protein, 36 aa, synthetic construct
  REGION 1..36: note = Description of Artificial Sequence: Synthetic polypeptide
MCMPCFTTDHQMVRRCDDCCGGRGRGRCYGPQCLCR

SEQ ID NO: 774 - protein, 36 aa, synthetic construct
  REGION 1..36: note = Description of Artificial Sequence: Synthetic polypeptide
KCMPCFTTDHQMVRRCDDCCGGRGRGRCYGPQCLCR

SEQ ID NO: 775 - protein, 36 aa, synthetic construct
  REGION 1..36: note = Description of Artificial Sequence: Synthetic polypeptide
VCVPCFTTDHQVVRRCDDCCGGRGRGRCYGPQCLCR

SEQ ID NO: 776 - protein, 36 aa, synthetic construct
  REGION 1..36: note = Description of Artificial Sequence: Synthetic polypeptide
KCVPCFTTDHQVVRRCDDCCGGRGRGRCYGPQCLCR

SEQ ID NO: 777 - protein, 36 aa, synthetic construct
  REGION 1..36: note = Description of Artificial Sequence: Synthetic polypeptide
  SITE 15: note = MOD_RES - Citrulline
  SITE 23: note = MOD_RES - Citrulline
MCMPCFTTDHQMVRXCDDCCGGXGRGKCYGPQCLCR

SEQ ID NO: 778 - protein, 36 aa, synthetic construct
  REGION 1..36: note = Description of Artificial Sequence: Synthetic polypeptide
  SITE 15: note = MOD_RES - Citrulline
  SITE 23: note = MOD_RES - Citrulline
  SITE 27: note = MOD_RES - Citrulline
MCMPCFTTDHQMVRXCDDCCGGXGRGXCYGPQCLCR

SEQ ID NO: 779 - protein, 36 aa, synthetic construct
  REGION 1..36: note = Description of Artificial Sequence: Synthetic polypeptide
  SITE 15: note = MOD_RES - Citrulline
  SITE 23: note = MOD_RES - Citrulline
  SITE 27: note = MOD_RES - Citrulline
KCMPCFTTDHQMVRXCDDCCGGXGRGXCYGPQCLCR

SEQ ID NO: 780 - protein, 36 aa, synthetic construct
  REGION 1..36: note = Description of Artificial Sequence: Synthetic polypeptide
  SITE 15: note = MOD_RES - Citrulline
  SITE 23: note = MOD_RES - Citrulline
VCVPCFTTDHQVVRXCDDCCGGXGRGKCYGPQCLCR

SEQ ID NO: 781 - protein, 36 aa, synthetic construct
  REGION 1..36: note = Description of Artificial Sequence: Synthetic polypeptide
  SITE 15: note = MOD_RES - Citrulline
  SITE 23: note = MOD_RES - Citrulline
  SITE 27: note = MOD_RES - Citrulline
VCVPCFTTDHQVVRXCDDCCGGXGRGXCYGPQCLCR

SEQ ID NO: 782 - protein, 36 aa, synthetic construct
  REGION 1..36: note = Description of Artificial Sequence: Synthetic polypeptide
  SITE 15: note = MOD_RES - Citrulline
  SITE 23: note = MOD_RES - Citrulline
  SITE 27: note = MOD_RES - Citrulline
KCVPCFTTDHQVVRXCDDCCGGXGRGXCYGPQCLCR

SEQ ID NO: 783 - protein, 43 aa, synthetic construct
  REGION 1..43: note = Description of Artificial Sequence: Synthetic polypeptide
MCMPCFTTDHQMVRKCDDCCGGKGRGKCYGPQCLCRGAGAAGG

SEQ ID NO: 784 - protein, 43 aa, synthetic construct
  REGION 1..43: note = Description of Artificial Sequence: Synthetic polypeptide
MCMPCFTTDHQMVRVCDDCCGGKGRGKCYGPQCLCRGAGAAGG

SEQ ID NO: 785 - protein, 43 aa, synthetic construct
  REGION 1..43: note = Description of Artificial Sequence: Synthetic polypeptide
MCMPCFTTDHQMVRRCDDCCGGKGRGKCYGPQCLCRGAGAAGG

SEQ ID NO: 786 - protein, 43 aa, synthetic construct
  REGION 1..43: note = Description of Artificial Sequence: Synthetic polypeptide
MCMPCFTTDHQMVRKCDDCCGGVGRGKCYGPQCLCRGAGAAGG

SEQ ID NO: 787 - protein, 43 aa, synthetic construct
  REGION 1..43: note = Description of Artificial Sequence: Synthetic polypeptide
MCMPCFTTDHQMVRVCDDCCGGVGRGKCYGPQCLCRGAGAAGG

SEQ ID NO: 788 - protein, 43 aa, synthetic construct
  REGION 1..43: note = Description of Artificial Sequence: Synthetic polypeptide
MCMPCFTTDHQMVRRCDDCCGGVGRGKCYGPQCLCRGAGAAGG

SEQ ID NO: 789 - protein, 43 aa, synthetic construct
  REGION 1..43: note = Description of Artificial Sequence: Synthetic polypeptide
MCMPCFTTDHQMVRKCDDCCGGRGRGKCYGPQCLCRGAGAAGG

SEQ ID NO: 790 - protein, 43 aa, synthetic construct
  REGION 1..43: note = Description of Artificial Sequence: Synthetic polypeptide
MCMPCFTTDHQMVRVCDDCCGGRGRGKCYGPQCLCRGAGAAGG

SEQ ID NO: 791 - protein, 43 aa, synthetic construct
  REGION 1..43: note = Description of Artificial Sequence: Synthetic polypeptide
MCMPCFTTDHQMVRRCDDCCGGRGRGKCYGPQCLCRGAGAAGG

SEQ ID NO: 792 - protein, 43 aa, synthetic construct
  REGION 1..43: note = Description of Artificial Sequence: Synthetic polypeptide
MCMPCFTTDHQMVRKCDDCCGGKGRGVCYGPQCLCRGAGAAGG

SEQ ID NO: 793 - protein, 43 aa, synthetic construct
  REGION 1..43: note = Description of Artificial Sequence: Synthetic polypeptide
MCMPCFTTDHQMVRVCDDCCGGKGRGVCYGPQCLCRGAGAAGG

SEQ ID NO: 794 - protein, 43 aa, synthetic construct
  REGION 1..43: note = Description of Artificial Sequence: Synthetic polypeptide
MCMPCFTTDHQMVRRCDDCCGGKGRGVCYGPQCLCRGAGAAGG

SEQ ID NO: 795 - protein, 43 aa, synthetic construct
  REGION 1..43: note = Description of Artificial Sequence: Synthetic polypeptide
MCMPCFTTDHQMVRKCDDCCGGVGRGVCYGPQCLCRGAGAAGG

SEQ ID NO: 796 - protein, 43 aa, synthetic construct
  REGION 1..43: note = Description of Artificial Sequence: Synthetic polypeptide
MCMPCFTTDHQMVRVCDDCCGGVGRGVCYGPQCLCRGAGAAGG

SEQ ID NO: 797 - protein, 43 aa, synthetic construct
  REGION 1..43: note = Description of Artificial Sequence: Synthetic polypeptide
MCMPCFTTDHQMVRRCDDCCGGVGRGVCYGPQCLCRGAGAAGG

SEQ ID NO: 798 - protein, 43 aa, synthetic construct
  REGION 1..43: note = Description of Artificial Sequence: Synthetic polypeptide
MCMPCFTTDHQMVRKCDDCCGGRGRGVCYGPQCLCRGAGAAGG

SEQ ID NO: 799 - protein, 43 aa, synthetic construct
  REGION 1..43: note = Description of Artificial Sequence: Synthetic polypeptide
MCMPCFTTDHQMVRVCDDCCGGRGRGVCYGPQCLCRGAGAAGG

SEQ ID NO: 800 - protein, 43 aa, synthetic construct
  REGION 1..43: note = Description of Artificial Sequence: Synthetic polypeptide
MCMPCFTTDHQMVRRCDDCCGGRGRGVCYGPQCLCRGAGAAGG

SEQ ID NO: 801 - protein, 43 aa, synthetic construct
  REGION 1..43: note = Description of Artificial Sequence: Synthetic polypeptide
MCMPCFTTDHQMVRKCDDCCGGKGRGRCYGPQCLCRGAGAAGG

SEQ ID NO: 802 - protein, 43 aa, synthetic construct
  REGION 1..43: note = Description of Artificial Sequence: Synthetic polypeptide
MCMPCFTTDHQMVRVCDDCCGGKGRGRCYGPQCLCRGAGAAGG

SEQ ID NO: 803 - protein, 43 aa, synthetic construct
  REGION 1..43: note = Description of Artificial Sequence: Synthetic polypeptide
MCMPCFTTDHQMVRRCDDCCGGKGRGRCYGPQCLCRGAGAAGG

SEQ ID NO: 804 - protein, 43 aa, synthetic construct
  REGION 1..43: note = Description of Artificial Sequence: Synthetic polypeptide
MCMPCFTTDHQMVRKCDDCCGGVGRGRCYGPQCLCRGAGAAGG

SEQ ID NO: 805 - protein, 43 aa, synthetic construct
  REGION 1..43: note = Description of Artificial Sequence: Synthetic polypeptide
MCMPCFTTDHQMVRVCDDCCGGVGRGRCYGPQCLCRGAGAAGG

SEQ ID NO: 806 - protein, 43 aa, synthetic construct
  REGION 1..43: note = Description of Artificial Sequence: Synthetic polypeptide
MCMPCFTTDHQMVRRCDDCCGGVGRGRCYGPQCLCRGAGAAGG

SEQ ID NO: 807 - protein, 43 aa, synthetic construct
  REGION 1..43: note = Description of Artificial Sequence: Synthetic polypeptide
MCMPCFTTDHQMVRKCDDCCGGRGRGRCYGPQCLCRGAGAAGG

SEQ ID NO: 808 - protein, 43 aa, synthetic construct
  REGION 1..43: note = Description of Artificial Sequence: Synthetic polypeptide
MCMPCFTTDHQMVRVCDDCCGGRGRGRCYGPQCLCRGAGAAGG

SEQ ID NO: 809 - protein, 43 aa, synthetic construct
  REGION 1..43: note = Description of Artificial Sequence: Synthetic polypeptide
MCMPCFTTDHQMVRRCDDCCGGRGRGRCYGPQCLCRGAGAAGG

SEQ ID NO: 810 - protein, 43 aa, synthetic construct
  REGION 1..43: note = Description of Artificial Sequence: Synthetic polypeptide
KCMPCFTTDHQMVRRCDDCCGGRGRGRCYGPQCLCRGAGAAGG

SEQ ID NO: 811 - protein, 43 aa, synthetic construct
  REGION 1..43: note = Description of Artificial Sequence: Synthetic polypeptide
VCVPCFTTDHQVVRRCDDCCGGRGRGRCYGPQCLCRGAGAAGG

SEQ ID NO: 812 - protein, 43 aa, synthetic construct
  REGION 1..43: note = Description of Artificial Sequence: Synthetic polypeptide
KCVPCFTTDHQVVRRCDDCCGGRGRGRCYGPQCLCRGAGAAGG

SEQ ID NO: 813 - protein, 43 aa, synthetic construct
  REGION 1..43: note = Description of Artificial Sequence: Synthetic polypeptide
  SITE 15: note = MOD_RES - Citrulline
  SITE 23: note = MOD_RES - Citrulline
MCMPCFTTDHQMVRXCDDCCGGXGRGKCYGPQCLCRGAGAAGG

SEQ ID NO: 814 - protein, 43 aa, synthetic construct
  REGION 1..43: note = Description of Artificial Sequence: Synthetic polypeptide
  SITE 15: note = MOD_RES - Citrulline
  SITE 23: note = MOD_RES - Citrulline
  SITE 27: note = MOD_RES - Citrulline
MCMPCFTTDHQMVRXCDDCCGGXGRGXCYGPQCLCRGAGAAGG

SEQ ID NO: 815 - protein, 43 aa, synthetic construct
  REGION 1..43: note = Description of Artificial Sequence: Synthetic polypeptide
  SITE 15: note = MOD_RES - Citrulline
  SITE 23: note = MOD_RES - Citrulline
  SITE 27: note = MOD_RES - Citrulline
KCMPCFTTDHQMVRXCDDCCGGXGRGXCYGPQCLCRGAGAAGG

SEQ ID NO: 816 - protein, 43 aa, synthetic construct
  REGION 1..43: note = Description of Artificial Sequence: Synthetic polypeptide
  SITE 15: note = MOD_RES - Citrulline
  SITE 23: note = MOD_RES - Citrulline
VCVPCFTTDHQVVRXCDDCCGGXGRGKCYGPQCLCRGAGAAGG

SEQ ID NO: 817 - protein, 43 aa, synthetic construct
  REGION 1..43: note = Description of Artificial Sequence: Synthetic polypeptide
  SITE 15: note = MOD_RES - Citrulline
  SITE 23: note = MOD_RES - Citrulline
  SITE 27: note = MOD_RES - Citrulline
VCVPCFTTDHQVVRXCDDCCGGXGRGXCYGPQCLCRGAGAAGG

SEQ ID NO: 818 - protein, 43 aa, synthetic construct
  REGION 1..43: note = Description of Artificial Sequence: Synthetic polypeptide
  SITE 15: note = MOD_RES - Citrulline
  SITE 23: note = MOD_RES - Citrulline
  SITE 27: note = MOD_RES - Citrulline
KCVPCFTTDHQVVRXCDDCCGGXGRGXCYGPQCLCRGAGAAGG

SEQ ID NO: 819 - protein, 36 aa, synthetic construct
  REGION 1..36: note = Description of Artificial Sequence: Synthetic polypeptide
MCMPCFTTDHQMLRKCDDCCGGKGRGKCYGPQCLCR

SEQ ID NO: 820 - protein, 36 aa, synthetic construct
  REGION 1..36: note = Description of Artificial Sequence: Synthetic polypeptide
MCMPCFTTDHQMLRLCDDCCGGKGRGKCYGPQCLCR

SEQ ID NO: 821 - protein, 36 aa, synthetic construct
  REGION 1..36: note = Description of Artificial Sequence: Synthetic polypeptide
MCMPCFTTDHQMLRRCDDCCGGKGRGKCYGPQCLCR

SEQ ID NO: 822 - protein, 36 aa, synthetic construct
  REGION 1..36: note = Description of Artificial Sequence: Synthetic polypeptide
MCMPCFTTDHQMLRKCDDCCGGLGRGKCYGPQCLCR

SEQ ID NO: 823 - protein, 36 aa, synthetic construct
  REGION 1..36: note = Description of Artificial Sequence: Synthetic polypeptide
MCMPCFTTDHQMLRLCDDCCGGLGRGKCYGPQCLCR

SEQ ID NO: 824 - protein, 36 aa, synthetic construct
  REGION 1..36: note = Description of Artificial Sequence: Synthetic polypeptide
MCMPCFTTDHQMLRRCDDCCGGLGRGKCYGPQCLCR

SEQ ID NO: 825 - protein, 36 aa, synthetic construct
  REGION 1..36: note = Description of Artificial Sequence: Synthetic polypeptide
MCMPCFTTDHQMLRKCDDCCGGRGRGKCYGPQCLCR

SEQ ID NO: 826 - protein, 36 aa, synthetic construct
  REGION 1..36: note = Description of Artificial Sequence: Synthetic polypeptide
MCMPCFTTDHQMLRLCDDCCGGRGRGKCYGPQCLCR

SEQ ID NO: 827 - protein, 36 aa, synthetic construct
  REGION 1..36: note = Description of Artificial Sequence: Synthetic polypeptide
MCMPCFTTDHQMLRRCDDCCGGRGRGKCYGPQCLCR

SEQ ID NO: 828 - protein, 36 aa, synthetic construct
  REGION 1..36: note = Description of Artificial Sequence: Synthetic polypeptide
MCMPCFTTDHQMLRKCDDCCGGKGRGLCYGPQCLCR

SEQ ID NO: 829 - protein, 36 aa, synthetic construct
  REGION 1..36: note = Description of Artificial Sequence: Synthetic polypeptide
MCMPCFTTDHQMLRLCDDCCGGKGRGLCYGPQCLCR

SEQ ID NO: 830 - protein, 36 aa, synthetic construct
  REGION 1..36: note = Description of Artificial Sequence: Synthetic polypeptide
MCMPCFTTDHQMLRRCDDCCGGKGRGLCYGPQCLCR

SEQ ID NO: 831 - protein, 36 aa, synthetic construct
  REGION 1..36: note = Description of Artificial Sequence: Synthetic polypeptide
MCMPCFTTDHQMLRKCDDCCGGLGRGLCYGPQCLCR

SEQ ID NO: 832 - protein, 36 aa, synthetic construct
  REGION 1..36: note = Description of Artificial Sequence: Synthetic polypeptide
MCMPCFTTDHQMLRLCDDCCGGLGRGLCYGPQCLCR

SEQ ID NO: 833 - protein, 36 aa, synthetic construct
  REGION 1..36: note = Description of Artificial Sequence: Synthetic polypeptide
MCMPCFTTDHQMLRRCDDCCGGLGRGLCYGPQCLCR

SEQ ID NO: 834 - protein, 36 aa, synthetic construct
  REGION 1..36: note = Description of Artificial Sequence: Synthetic polypeptide
MCMPCFTTDHQMLRKCDDCCGGRGRGLCYGPQCLCR

SEQ ID NO: 835 - protein, 36 aa, synthetic construct
  REGION 1..36: note = Description of Artificial Sequence: Synthetic polypeptide
MCMPCFTTDHQMLRLCDDCCGGRGRGLCYGPQCLCR

SEQ ID NO: 836 - protein, 36 aa, synthetic construct
  REGION 1..36: note = Description of Artificial Sequence: Synthetic polypeptide
MCMPCFTTDHQMLRRCDDCCGGRGRGLCYGPQCLCR

SEQ ID NO: 837 - protein, 36 aa, synthetic construct
  REGION 1..36: note = Description of Artificial Sequence: Synthetic polypeptide
MCMPCFTTDHQMLRKCDDCCGGKGRGRCYGPQCLCR

SEQ ID NO: 838 - protein, 36 aa, synthetic construct
  REGION 1..36: note = Description of Artificial Sequence: Synthetic polypeptide
MCMPCFTTDHQMLRLCDDCCGGKGRGRCYGPQCLCR

SEQ ID NO: 839 - protein, 36 aa, synthetic construct
  REGION 1..36: note = Description of Artificial Sequence: Synthetic polypeptide
MCMPCFTTDHQMLRRCDDCCGGKGRGRCYGPQCLCR

SEQ ID NO: 840 - protein, 36 aa, synthetic construct
  REGION 1..36: note = Description of Artificial Sequence: Synthetic polypeptide
MCMPCFTTDHQMLRKCDDCCGGLGRGRCYGPQCLCR

SEQ ID NO: 841 - protein, 36 aa, synthetic construct
  REGION 1..36: note = Description of Artificial Sequence: Synthetic polypeptide
MCMPCFTTDHQMLRLCDDCCGGLGRGRCYGPQCLCR

SEQ ID NO: 842 - protein, 36 aa, synthetic construct
  REGION 1..36: note = Description of Artificial Sequence: Synthetic polypeptide
MCMPCFTTDHQMLRRCDDCCGGLGRGRCYGPQCLCR

SEQ ID NO: 843 - protein, 36 aa, synthetic construct
  REGION 1..36: note = Description of Artificial Sequence: Synthetic polypeptide
MCMPCFTTDHQMLRKCDDCCGGRGRGRCYGPQCLCR

SEQ ID NO: 844 - protein, 36 aa, synthetic construct
  REGION 1..36: note = Description of Artificial Sequence: Synthetic polypeptide
MCMPCFTTDHQMLRLCDDCCGGRGRGRCYGPQCLCR

SEQ ID NO: 845 - protein, 36 aa, synthetic construct
  REGION 1..36: note = Description of Artificial Sequence: Synthetic polypeptide
MCMPCFTTDHQMLRRCDDCCGGRGRGRCYGPQCLCR

SEQ ID NO: 846 - protein, 36 aa, synthetic construct
  REGION 1..36: note = Description of Artificial Sequence: Synthetic polypeptide
KCMPCFTTDHQMLRRCDDCCGGRGRGRCYGPQCLCR

SEQ ID NO: 847 - protein, 36 aa, synthetic construct
  REGION 1..36: note = Description of Artificial Sequence: Synthetic polypeptide
LCLPCFTTDHQLLRRCDDCCGGRGRGRCYGPQCLCR

SEQ ID NO: 848 - protein, 36 aa, synthetic construct
  REGION 1..36: note = Description of Artificial Sequence: Synthetic polypeptide
KCLPCFTTDHQLLRRCDDCCGGRGRGRCYGPQCLCR

SEQ ID NO: 849 - protein, 36 aa, synthetic construct
  REGION 1..36: note = Description of Artificial Sequence: Synthetic polypeptide
  SITE 15: note = MOD_RES - Citrulline
  SITE 23: note = MOD_RES - Citrulline
MCMPCFTTDHQMLRXCDDCCGGXGRGKCYGPQCLCR

SEQ ID NO: 850 - protein, 36 aa, synthetic construct
  REGION 1..36: note = Description of Artificial Sequence: Synthetic polypeptide
  SITE 15: note = MOD_RES - Citrulline
  SITE 23: note = MOD_RES - Citrulline
  SITE 27: note = MOD_RES - Citrulline
MCMPCFTTDHQMLRXCDDCCGGXGRGXCYGPQCLCR

SEQ ID NO: 851 - protein, 36 aa, synthetic construct
  REGION 1..36: note = Description of Artificial Sequence: Synthetic polypeptide
  SITE 15: note = MOD_RES - Citrulline
  SITE 23: note = MOD_RES - Citrulline
  SITE 27: note = MOD_RES - Citrulline
KCMPCFTTDHQMLRXCDDCCGGXGRGXCYGPQCLCR

SEQ ID NO: 852 - protein, 36 aa, synthetic construct
  REGION 1..36: note = Description of Artificial Sequence: Synthetic polypeptide
  SITE 15: note = MOD_RES - Citrulline
  SITE 23: note = MOD_RES - Citrulline
LCLPCFTTDHQLLRXCDDCCGGXGRGKCYGPQCLCR

SEQ ID NO: 853 - protein, 36 aa, synthetic construct
  REGION 1..36: note = Description of Artificial Sequence: Synthetic polypeptide
  SITE 15: note = MOD_RES - Citrulline
  SITE 23: note = MOD_RES - Citrulline
  SITE 27: note = MOD_RES - Citrulline
LCLPCFTTDHQLLRXCDDCCGGXGRGXCYGPQCLCR

SEQ ID NO: 854 - protein, 36 aa, synthetic construct
  REGION 1..36: note = Description of Artificial Sequence: Synthetic polypeptide
  SITE 15: note = MOD_RES - Citrulline
  SITE 23: note = MOD_RES - Citrulline
  SITE 27: note = MOD_RES - Citrulline
KCLPCFTTDHQLLRXCDDCCGGXGRGXCYGPQCLCR

SEQ ID NO: 855 - protein, 43 aa, synthetic construct
  REGION 1..43: note = Description of Artificial Sequence: Synthetic polypeptide
MCMPCFTTDHQMLRKCDDCCGGKGRGKCYGPQCLCRGAGAAGG

SEQ ID NO: 856 - protein, 43 aa, synthetic construct
  REGION 1..43: note = Description of Artificial Sequence: Synthetic polypeptide
MCMPCFTTDHQMLRLCDDCCGGKGRGKCYGPQCLCRGAGAAGG

SEQ ID NO: 857 - protein, 43 aa, synthetic construct
  REGION 1..43: note = Description of Artificial Sequence: Synthetic polypeptide
MCMPCFTTDHQMLRRCDDCCGGKGRGKCYGPQCLCRGAGAAGG

SEQ ID NO: 858 - protein, 43 aa, synthetic construct
  REGION 1..43: note = Description of Artificial Sequence: Synthetic polypeptide
MCMPCFTTDHQMLRKCDDCCGGLGRGKCYGPQCLCRGAGAAGG

SEQ ID NO: 859 - protein, 43 aa, synthetic construct
  REGION 1..43: note = Description of Artificial Sequence: Synthetic polypeptide
MCMPCFTTDHQMLRLCDDCCGGLGRGKCYGPQCLCRGAGAAGG

SEQ ID NO: 860 - protein, 43 aa, synthetic construct
  REGION 1..43: note = Description of Artificial Sequence: Synthetic polypeptide
MCMPCFTTDHQMLRRCDDCCGGLGRGKCYGPQCLCRGAGAAGG

SEQ ID NO: 861 - protein, 43 aa, synthetic construct
  REGION 1..43: note = Description of Artificial Sequence: Synthetic polypeptide
MCMPCFTTDHQMLRKCDDCCGGRGRGKCYGPQCLCRGAGAAGG

SEQ ID NO: 862 - protein, 43 aa, synthetic construct
  REGION 1..43: note = Description of Artificial Sequence: Synthetic polypeptide
MCMPCFTTDHQMLRLCDDCCGGRGRGKCYGPQCLCRGAGAAGG

SEQ ID NO: 863 - protein, 43 aa, synthetic construct
  REGION 1..43: note = Description of Artificial Sequence: Synthetic polypeptide
MCMPCFTTDHQMLRRCDDCCGGRGRGKCYGPQCLCRGAGAAGG

SEQ ID NO: 864 - protein, 43 aa, synthetic construct
  REGION 1..43: note = Description of Artificial Sequence: Synthetic polypeptide
MCMPCFTTDHQMLRKCDDCCGGKGRGLCYGPQCLCRGAGAAGG

SEQ ID NO: 865 - protein, 43 aa, synthetic construct
  REGION 1..43: note = Description of Artificial Sequence: Synthetic polypeptide
MCMPCFTTDHQMLRLCDDCCGGKGRGLCYGPQCLCRGAGAAGG

SEQ ID NO: 866 - protein, 43 aa, synthetic construct
  REGION 1..43: note = Description of Artificial Sequence: Synthetic polypeptide
MCMPCFTTDHQMLRRCDDCCGGKGRGLCYGPQCLCRGAGAAGG

SEQ ID NO: 867 - protein, 43 aa, synthetic construct
  REGION 1..43: note = Description of Artificial Sequence: Synthetic polypeptide
MCMPCFTTDHQMLRKCDDCCGGLGRGLCYGPQCLCRGAGAAGG

SEQ ID NO: 868 - protein, 43 aa, synthetic construct
  REGION 1..43: note = Description of Artificial Sequence: Synthetic polypeptide
MCMPCFTTDHQMLRLCDDCCGGLGRGLCYGPQCLCRGAGAAGG

SEQ ID NO: 869 - protein, 43 aa, synthetic construct
  REGION 1..43: note = Description of Artificial Sequence: Synthetic polypeptide
MCMPCFTTDHQMLRRCDDCCGGLGRGLCYGPQCLCRGAGAAGG

SEQ ID NO: 870 - protein, 43 aa, synthetic construct
  REGION 1..43: note = Description of Artificial Sequence: Synthetic polypeptide
MCMPCFTTDHQMLRKCDDCCGGRGRGLCYGPQCLCRGAGAAGG

SEQ ID NO: 871 - protein, 43 aa, synthetic construct
  REGION 1..43: note = Description of Artificial Sequence: Synthetic polypeptide
MCMPCFTTDHQMLRLCDDCCGGRGRGLCYGPQCLCRGAGAAGG

SEQ ID NO: 872 - protein, 43 aa, synthetic construct
  REGION 1..43: note = Description of Artificial Sequence: Synthetic polypeptide
MCMPCFTTDHQMLRRCDDCCGGRGRGLCYGPQCLCRGAGAAGG

SEQ ID NO: 873 - protein, 43 aa, synthetic construct
  REGION 1..43: note = Description of Artificial Sequence: Synthetic polypeptide
MCMPCFTTDHQMLRKCDDCCGGKGRGRCYGPQCLCRGAGAAGG

SEQ ID NO: 874 - protein, 43 aa, synthetic construct
  REGION 1..43: note = Description of Artificial Sequence: Synthetic polypeptide
MCMPCFTTDHQMLRLCDDCCGGKGRGRCYGPQCLCRGAGAAGG

SEQ ID NO: 875 - protein, 43 aa, synthetic construct
  REGION 1..43: note = Description of Artificial Sequence: Synthetic polypeptide
MCMPCFTTDHQMLRRCDDCCGGKGRGRCYGPQCLCRGAGAAGG

SEQ ID NO: 876 - protein, 43 aa, synthetic construct
  REGION 1..43: note = Description of Artificial Sequence: Synthetic polypeptide
MCMPCFTTDHQMLRKCDDCCGGLGRGRCYGPQCLCRGAGAAGG

SEQ ID NO: 877 - protein, 43 aa, synthetic construct
  REGION 1..43: note = Description of Artificial Sequence: Synthetic polypeptide
MCMPCFTTDHQMLRLCDDCCGGLGRGRCYGPQCLCRGAGAAGG

SEQ ID NO: 878 - protein, 43 aa, synthetic construct
  REGION 1..43: note = Description of Artificial Sequence: Synthetic polypeptide
MCMPCFTTDHQMLRRCDDCCGGLGRGRCYGPQCLCRGAGAAGG

SEQ ID NO: 879 - protein, 43 aa, synthetic construct
  REGION 1..43: note = Description of Artificial Sequence: Synthetic polypeptide
MCMPCFTTDHQMLRKCDDCCGGRGRGRCYGPQCLCRGAGAAGG

SEQ ID NO: 880 - protein, 43 aa, synthetic construct
  REGION 1..43: note = Description of Artificial Sequence: Synthetic polypeptide
MCMPCFTTDHQMLRLCDDCCGGRGRGRCYGPQCLCRGAGAAGG

SEQ ID NO: 881 - protein, 43 aa, synthetic construct
  REGION 1..43: note = Description of Artificial Sequence: Synthetic polypeptide
MCMPCFTTDHQMLRRCDDCCGGRGRGRCYGPQCLCRGAGAAGG

SEQ ID NO: 882 - protein, 43 aa, synthetic construct
  REGION 1..43: note = Description of Artificial Sequence: Synthetic polypeptide
KCMPCFTTDHQMLRRCDDCCGGRGRGRCYGPQCLCRGAGAAGG

SEQ ID NO: 883 - protein, 43 aa, synthetic construct
  REGION 1..43: note = Description of Artificial Sequence: Synthetic polypeptide
LCLPCFTTDHQLLRRCDDCCGGRGRGRCYGPQCLCRGAGAAGG

SEQ ID NO: 884 - protein, 43 aa, synthetic construct
  REGION 1..43: note = Description of Artificial Sequence: Synthetic polypeptide
KCLPCFTTDHQLLRRCDDCCGGRGRGRCYGPQCLCRGAGAAGG

SEQ ID NO: 885 - protein, 43 aa, synthetic construct
  REGION 1..43: note = Description of Artificial Sequence: Synthetic polypeptide
  SITE 15: note = MOD_RES - Citrulline
  SITE 23: note = MOD_RES - Citrulline
MCMPCFTTDHQMLRXCDDCCGGXGRGKCYGPQCLCRGAGAAGG

SEQ ID NO: 886 - protein, 43 aa, synthetic construct
  REGION 1..43: note = Description of Artificial Sequence: Synthetic polypeptide
  SITE 15: note = MOD_RES - Citrulline
  SITE 23: note = MOD_RES - Citrulline
  SITE 27: note = MOD_RES - Citrulline
MCMPCFTTDHQMLRXCDDCCGGXGRGXCYGPQCLCRGAGAAGG

SEQ ID NO: 887 - protein, 43 aa, synthetic construct
  REGION 1..43: note = Description of Artificial Sequence: Synthetic polypeptide
  SITE 15: note = MOD_RES - Citrulline
  SITE 23: note = MOD_RES - Citrulline
  SITE 27: note = MOD_RES - Citrulline
KCMPCFTTDHQMLRXCDDCCGGXGRGXCYGPQCLCRGAGAAGG

SEQ ID NO: 888 - protein, 43 aa, synthetic construct
  REGION 1..43: note = Description of Artificial Sequence: Synthetic polypeptide
  SITE 15: note = MOD_RES - Citrulline
  SITE 23: note = MOD_RES - Citrulline
LCLPCFTTDHQLLRXCDDCCGGXGRGKCYGPQCLCRGAGAAGG

SEQ ID NO: 889 - protein, 43 aa, synthetic construct
  REGION 1..43: note = Description of Artificial Sequence: Synthetic polypeptide
  SITE 15: note = MOD_RES - Citrulline
  SITE 23: note = MOD_RES - Citrulline
  SITE 27: note = MOD_RES - Citrulline
LCLPCFTTDHQLLRXCDDCCGGXGRGXCYGPQCLCRGAGAAGG

SEQ ID NO: 890 - protein, 43 aa, synthetic construct
  REGION 1..43: note = Description of Artificial Sequence: Synthetic polypeptide
  SITE 15: note = MOD_RES - Citrulline
  SITE 23: note = MOD_RES - Citrulline
  SITE 27: note = MOD_RES - Citrulline
KCLPCFTTDHQLLRXCDDCCGGXGRGXCYGPQCLCRGAGAAGG

SEQ ID NO: 891 - protein, 36 aa, synthetic construct
  REGION 1..36: note = Description of Artificial Sequence: Synthetic polypeptide
GCGPCFTTDHQGARKCDDCCGGKGRGKCYGPQCLCR

SEQ ID NO: 892 - protein, 36 aa, synthetic construct
  REGION 1..36: note = Description of Artificial Sequence: Synthetic polypeptide
GCGPCFTTDHQGARACDDCCGGKGRGKCYGPQCLCR

SEQ ID NO: 893 - protein, 36 aa, synthetic construct
  REGION 1..36: note = Description of Artificial Sequence: Synthetic polypeptide
GCGPCFTTDHQGARRCDDCCGGKGRGKCYGPQCLCR

SEQ ID NO: 894 - protein, 36 aa, synthetic construct
  REGION 1..36: note = Description of Artificial Sequence: Synthetic polypeptide
GCGPCFTTDHQGARKCDDCCGGAGRGKCYGPQCLCR

SEQ ID NO: 895 - protein, 36 aa, synthetic construct
  REGION 1..36: note = Description of Artificial Sequence: Synthetic polypeptide
GCGPCFTTDHQGARACDDCCGGAGRGKCYGPQCLCR

SEQ ID NO: 896 - protein, 36 aa, synthetic construct
  REGION 1..36: note = Description of Artificial Sequence: Synthetic polypeptide
GCGPCFTTDHQGARRCDDCCGGAGRGKCYGPQCLCR

SEQ ID NO: 897 - protein, 36 aa, synthetic construct
  REGION 1..36: note = Description of Artificial Sequence: Synthetic polypeptide
GCGPCFTTDHQGARKCDDCCGGRGRGKCYGPQCLCR

SEQ ID NO: 898 - protein, 36 aa, synthetic construct
  REGION 1..36: note = Description of Artificial Sequence: Synthetic polypeptide
GCGPCFTTDHQGARACDDCCGGRGRGKCYGPQCLCR

SEQ ID NO: 899 - protein, 36 aa, synthetic construct
  REGION 1..36: note = Description of Artificial Sequence: Synthetic polypeptide
GCGPCFTTDHQGARRCDDCCGGRGRGKCYGPQCLCR

SEQ ID NO: 900 - protein, 36 aa, synthetic construct
  REGION 1..36: note = Description of Artificial Sequence: Synthetic polypeptide
GCGPCFTTDHQGARKCDDCCGGKGRGACYGPQCLCR

SEQ ID NO: 901 - protein, 36 aa, synthetic construct
  REGION 1..36: note = Description of Artificial Sequence: Synthetic polypeptide
GCGPCFTTDHQGARACDDCCGGKGRGACYGPQCLCR

SEQ ID NO: 902 - protein, 36 aa, synthetic construct
  REGION 1..36: note = Description of Artificial Sequence: Synthetic polypeptide
GCGPCFTTDHQGARRCDDCCGGKGRGACYGPQCLCR

SEQ ID NO: 903 - protein, 36 aa, synthetic construct
  REGION 1..36: note = Description of Artificial Sequence: Synthetic polypeptide
GCGPCFTTDHQGARKCDDCCGGAGRGACYGPQCLCR

SEQ ID NO: 904 - protein, 36 aa, synthetic construct
  REGION 1..36: note = Description of Artificial Sequence: Synthetic polypeptide
GCGPCFTTDHQGARACDDCCGGAGRGACYGPQCLCR

SEQ ID NO: 905 - protein, 36 aa, synthetic construct
  REGION 1..36: note = Description of Artificial Sequence: Synthetic polypeptide
GCGPCFTTDHQGARRCDDCCGGAGRGACYGPQCLCR

SEQ ID NO: 906 - protein, 36 aa, synthetic construct
  REGION 1..36: note = Description of Artificial Sequence: Synthetic polypeptide
GCGPCFTTDHQGARKCDDCCGGRGRGACYGPQCLCR

SEQ ID NO: 907 - protein, 36 aa, synthetic construct
  REGION 1..36: note = Description of Artificial Sequence: Synthetic polypeptide
GCGPCFTTDHQGARACDDCCGGRGRGACYGPQCLCR

SEQ ID NO: 908 - protein, 36 aa, synthetic construct
  REGION 1..36: note = Description of Artificial Sequence: Synthetic polypeptide
GCGPCFTTDHQGARRCDDCCGGRGRGACYGPQCLCR

SEQ ID NO: 909 - protein, 36 aa, synthetic construct
  REGION 1..36: note = Description of Artificial Sequence: Synthetic polypeptide
GCGPCFTTDHQGARKCDDCCGGKGRGRCYGPQCLCR

SEQ ID NO: 910 - protein, 36 aa, synthetic construct
  REGION 1..36: note = Description of Artificial Sequence: Synthetic polypeptide
GCGPCFTTDHQGARACDDCCGGKGRGRCYGPQCLCR

SEQ ID NO: 911 - protein, 36 aa, synthetic construct
  REGION 1..36: note = Description of Artificial Sequence: Synthetic polypeptide
GCGPCFTTDHQGARRCDDCCGGKGRGRCYGPQCLCR

SEQ ID NO: 912 - protein, 36 aa, synthetic construct
  REGION 1..36: note = Description of Artificial Sequence: Synthetic polypeptide
GCGPCFTTDHQGARKCDDCCGGAGRGRCYGPQCLCR

SEQ ID NO: 913 - protein, 36 aa, synthetic construct
  REGION 1..36: note = Description of Artificial Sequence: Synthetic polypeptide
GCGPCFTTDHQGARACDDCCGGAGRGRCYGPQCLCR

SEQ ID NO: 914 - protein, 36 aa, synthetic construct
  REGION 1..36: note = Description of Artificial Sequence: Synthetic polypeptide
GCGPCFTTDHQGARRCDDCCGGAGRGRCYGPQCLCR

SEQ ID NO: 915 - protein, 36 aa, synthetic construct
  REGION 1..36: note = Description of Artificial Sequence: Synthetic polypeptide
GCGPCFTTDHQGARKCDDCCGGRGRGRCYGPQCLCR

SEQ ID NO: 916 - protein, 36 aa, synthetic construct
  REGION 1..36: note = Description of Artificial Sequence: Synthetic polypeptide
GCGPCFTTDHQGARACDDCCGGRGRGRCYGPQCLCR

SEQ ID NO: 917 - protein, 36 aa, synthetic construct
  REGION 1..36: note = Description of Artificial Sequence: Synthetic polypeptide
GCGPCFTTDHQGARRCDDCCGGRGRGRCYGPQCLCR

SEQ ID NO: 918 - protein, 36 aa, synthetic construct
  REGION 1..36: note = Description of Artificial Sequence: Synthetic polypeptide
KCGPCFTTDHQGARRCDDCCGGRGRGRCYGPQCLCR

SEQ ID NO: 919 - protein, 36 aa, synthetic construct
  REGION 1..36: note = Description of Artificial Sequence: Synthetic polypeptide
  SITE 15: note = MOD_RES - Citrulline
  SITE 23: note = MOD_RES - Citrulline
GCGPCFTTDHQGARXCDDCCGGXGRGKCYGPQCLCR

SEQ ID NO: 920 - protein, 36 aa, synthetic construct
  REGION 1..36: note = Description of Artificial Sequence: Synthetic polypeptide
  SITE 15: note = MOD_RES - Citrulline
  SITE 23: note = MOD_RES - Citrulline
  SITE 27: note = MOD_RES - Citrulline
GCGPCFTTDHQGARXCDDCCGGXGRGXCYGPQCLCR

SEQ ID NO: 921 - protein, 36 aa, synthetic construct
  REGION 1..36: note = Description of Artificial Sequence: Synthetic polypeptide
  SITE 15: note = MOD_RES - Citrulline
  SITE 23: note = MOD_RES - Citrulline
  SITE 27: note = MOD_RES - Citrulline
KCGPCFTTDHQGARXCDDCCGGXGRGXCYGPQCLCR

SEQ ID NO: 922 - protein, 36 aa, synthetic construct
  REGION 1..36: note = Description of Artificial Sequence: Synthetic polypeptide
ACAPCFTTDHQAARACDDCCGGKGRGKCYGPQCLCR

SEQ ID NO: 923 - protein, 36 aa, synthetic construct
  REGION 1..36: note = Description of Artificial Sequence: Synthetic polypeptide
ACAPCFTTDHQAARRCDDCCGGKGRGKCYGPQCLCR

SEQ ID NO: 924 - protein, 36 aa, synthetic construct
  REGION 1..36: note = Description of Artificial Sequence: Synthetic polypeptide
ACAPCFTTDHQAARKCDDCCGGAGRGKCYGPQCLCR

SEQ ID NO: 925 - protein, 36 aa, synthetic construct
  REGION 1..36: note = Description of Artificial Sequence: Synthetic polypeptide
ACAPCFTTDHQAARACDDCCGGAGRGKCYGPQCLCR

SEQ ID NO: 926 - protein, 36 aa, synthetic construct
  REGION 1..36: note = Description of Artificial Sequence: Synthetic polypeptide
ACAPCFTTDHQAARRCDDCCGGAGRGKCYGPQCLCR

SEQ ID NO: 927 - protein, 36 aa, synthetic construct
  REGION 1..36: note = Description of Artificial Sequence: Synthetic polypeptide
ACAPCFTTDHQAARKCDDCCGGRGRGKCYGPQCLCR

SEQ ID NO: 928 - protein, 36 aa, synthetic construct
  REGION 1..36: note = Description of Artificial Sequence: Synthetic polypeptide
ACAPCFTTDHQAARACDDCCGGRGRGKCYGPQCLCR

SEQ ID NO: 929 - protein, 36 aa, synthetic construct
  REGION 1..36: note = Description of Artificial Sequence: Synthetic polypeptide
ACAPCFTTDHQAARKCDDCCGGKGRGACYGPQCLCR

SEQ ID NO: 930 - protein, 36 aa, synthetic construct
  REGION 1..36: note = Description of Artificial Sequence: Synthetic polypeptide
ACAPCFTTDHQAARACDDCCGGKGRGACYGPQCLCR

SEQ ID NO: 931 - protein, 36 aa, synthetic construct
  REGION 1..36: note = Description of Artificial Sequence: Synthetic polypeptide
ACAPCFTTDHQAARRCDDCCGGKGRGACYGPQCLCR

SEQ ID NO: 932 - protein, 36 aa, synthetic construct
  REGION 1..36: note = Description of Artificial Sequence: Synthetic polypeptide
ACAPCFTTDHQAARKCDDCCGGAGRGACYGPQCLCR

SEQ ID NO: 933 - protein, 36 aa, synthetic construct
  REGION 1..36: note = Description of Artificial Sequence: Synthetic polypeptide
ACAPCFTTDHQAARACDDCCGGAGRGACYGPQCLCR

SEQ ID NO: 934 - protein, 36 aa, synthetic construct
  REGION 1..36: note = Description of Artificial Sequence: Synthetic polypeptide
ACAPCFTTDHQAARRCDDCCGGAGRGACYGPQCLCR

SEQ ID NO: 935 - protein, 36 aa, synthetic construct
  REGION 1..36: note = Description of Artificial Sequence: Synthetic polypeptide
ACAPCFTTDHQAARKCDDCCGGRGRGACYGPQCLCR

SEQ ID NO: 936 - protein, 36 aa, synthetic construct
  REGION 1..36: note = Description of Artificial Sequence: Synthetic polypeptide
ACAPCFTTDHQAARACDDCCGGRGRGACYGPQCLCR

SEQ ID NO: 937 - protein, 36 aa, synthetic construct
  REGION 1..36: note = Description of Artificial Sequence: Synthetic polypeptide
ACAPCFTTDHQAARRCDDCCGGRGRGACYGPQCLCR

SEQ ID NO: 938 - protein, 36 aa, synthetic construct
  REGION 1..36: note = Description of Artificial Sequence: Synthetic polypeptide
ACAPCFTTDHQAARKCDDCCGGKGRGRCYGPQCLCR

SEQ ID NO: 939 - protein, 36 aa, synthetic construct
  REGION 1..36: note = Description of Artificial Sequence: Synthetic polypeptide
ACAPCFTTDHQAARACDDCCGGKGRGRCYGPQCLCR

SEQ ID NO: 940 - protein, 36 aa, synthetic construct
  REGION 1..36: note = Description of Artificial Sequence: Synthetic polypeptide
ACAPCFTTDHQAARRCDDCCGGKGRGRCYGPQCLCR

SEQ ID NO: 941 - protein, 36 aa, synthetic construct
  REGION 1..36: note = Description of Artificial Sequence: Synthetic polypeptide
ACAPCFTTDHQAARKCDDCCGGAGRGRCYGPQCLCR

SEQ ID NO: 942 - protein, 36 aa, synthetic construct
  REGION 1..36: note = Description of Artificial Sequence: Synthetic polypeptide
ACAPCFTTDHQAARACDDCCGGAGRGRCYGPQCLCR

SEQ ID NO: 943 - protein, 36 aa, synthetic construct
  REGION 1..36: note = Description of Artificial Sequence: Synthetic polypeptide
ACAPCFTTDHQAARRCDDCCGGAGRGRCYGPQCLCR

SEQ ID NO: 944 - protein, 36 aa, synthetic construct
  REGION 1..36: note = Description of Artificial Sequence: Synthetic polypeptide
ACAPCFTTDHQAARKCDDCCGGRGRGRCYGPQCLCR

SEQ ID NO: 945 - protein, 36 aa, synthetic construct
  REGION 1..36: note = Description of Artificial Sequence: Synthetic polypeptide
ACAPCFTTDHQAARACDDCCGGRGRGRCYGPQCLCR

SEQ ID NO: 946 - protein, 36 aa, synthetic construct
  REGION 1..36: note = Description of Artificial Sequence: Synthetic polypeptide
ICIPCFTTDHQIARKCDDCCGGKGRGKCYGPQCLCR

SEQ ID NO: 947 - protein, 36 aa, synthetic construct
  REGION 1..36: note = Description of Artificial Sequence: Synthetic polypeptide
ICIPCFTTDHQIARACDDCCGGKGRGKCYGPQCLCR

SEQ ID NO: 948 - protein, 36 aa, synthetic construct
  REGION 1..36: note = Description of Artificial Sequence: Synthetic polypeptide
ICIPCFTTDHQIARRCDDCCGGKGRGKCYGPQCLCR

SEQ ID NO: 949 - protein, 36 aa, synthetic construct
  REGION 1..36: note = Description of Artificial Sequence: Synthetic polypeptide
ICIPCFTTDHQIARKCDDCCGGAGRGKCYGPQCLCR

SEQ ID NO: 950 - protein, 36 aa, synthetic construct
  REGION 1..36: note = Description of Artificial Sequence: Synthetic polypeptide
ICIPCFTTDHQIARACDDCCGGAGRGKCYGPQCLCR

SEQ ID NO: 951 - protein, 36 aa, synthetic construct
  REGION 1..36: note = Description of Artificial Sequence: Synthetic polypeptide
ICIPCFTTDHQIARRCDDCCGGAGRGKCYGPQCLCR

SEQ ID NO: 952 - protein, 36 aa, synthetic construct
  REGION 1..36: note = Description of Artificial Sequence: Synthetic polypeptide
ICIPCFTTDHQIARKCDDCCGGRGRGKCYGPQCLCR

SEQ ID NO: 953 - protein, 36 aa, synthetic construct
  REGION 1..36: note = Description of Artificial Sequence: Synthetic polypeptide
ICIPCFTTDHQIARACDDCCGGRGRGKCYGPQCLCR

SEQ ID NO: 954 - protein, 36 aa, synthetic construct
  REGION 1..36: note = Description of Artificial Sequence: Synthetic polypeptide
ICIPCFTTDHQIARKCDDCCGGKGRGACYGPQCLCR

SEQ ID NO: 955 - protein, 36 aa, synthetic construct
  REGION 1..36: note = Description of Artificial Sequence: Synthetic polypeptide
ICIPCFTTDHQIARACDDCCGGKGRGACYGPQCLCR

SEQ ID NO: 956 - protein, 36 aa, synthetic construct
  REGION 1..36: note = Description of Artificial Sequence: Synthetic polypeptide
ICIPCFTTDHQIARRCDDCCGGKGRGACYGPQCLCR

SEQ ID NO: 957 - protein, 36 aa, synthetic construct
  REGION 1..36: note = Description of Artificial Sequence: Synthetic polypeptide
ICIPCFTTDHQIARKCDDCCGGAGRGACYGPQCLCR

SEQ ID NO: 958 - protein, 36 aa, synthetic construct
  REGION 1..36: note = Description of Artificial Sequence: Synthetic polypeptide
ICIPCFTTDHQIARACDDCCGGAGRGACYGPQCLCR

SEQ ID NO: 959 - protein, 36 aa, synthetic construct
  REGION 1..36: note = Description of Artificial Sequence: Synthetic polypeptide
ICIPCFTTDHQIARRCDDCCGGAGRGACYGPQCLCR

SEQ ID NO: 960 - protein, 36 aa, synthetic construct
  REGION 1..36: note = Description of Artificial Sequence: Synthetic polypeptide
ICIPCFTTDHQIARKCDDCCGGRGRGACYGPQCLCR

SEQ ID NO: 961 - protein, 36 aa, synthetic construct
  REGION 1..36: note = Description of Artificial Sequence: Synthetic polypeptide
ICIPCFTTDHQIARACDDCCGGRGRGACYGPQCLCR

SEQ ID NO: 962 - protein, 36 aa, synthetic construct
  REGION 1..36: note = Description of Artificial Sequence: Synthetic polypeptide
ICIPCFTTDHQIARRCDDCCGGRGRGACYGPQCLCR

SEQ ID NO: 963 - protein, 36 aa, synthetic construct
  REGION 1..36: note = Description of Artificial Sequence: Synthetic polypeptide
ICIPCFTTDHQIARKCDDCCGGKGRGRCYGPQCLCR

SEQ ID NO: 964 - protein, 36 aa, synthetic construct
  REGION 1..36: note = Description of Artificial Sequence: Synthetic polypeptide
ICIPCFTTDHQIARACDDCCGGKGRGRCYGPQCLCR

SEQ ID NO: 965 - protein, 36 aa, synthetic construct
  REGION 1..36: note = Description of Artificial Sequence: Synthetic polypeptide
ICIPCFTTDHQIARRCDDCCGGKGRGRCYGPQCLCR

SEQ ID NO: 966 - protein, 36 aa, synthetic construct
  REGION 1..36: note = Description of Artificial Sequence: Synthetic polypeptide
ICIPCFTTDHQIARKCDDCCGGAGRGRCYGPQCLCR

SEQ ID NO: 967 - protein, 36 aa, synthetic construct
  REGION 1..36: note = Description of Artificial Sequence: Synthetic polypeptide
ICIPCFTTDHQIARACDDCCGGAGRGRCYGPQCLCR

SEQ ID NO: 968 - protein, 36 aa, synthetic construct
  REGION 1..36: note = Description of Artificial Sequence: Synthetic polypeptide
ICIPCFTTDHQIARRCDDCCGGAGRGRCYGPQCLCR

SEQ ID NO: 969 - protein, 36 aa, synthetic construct
  REGION 1..36: note = Description of Artificial Sequence: Synthetic polypeptide
ICIPCFTTDHQIARKCDDCCGGRGRGRCYGPQCLCR

SEQ ID NO: 970 - protein, 36 aa, synthetic construct
  REGION 1..36: note = Description of Artificial Sequence: Synthetic polypeptide
ICIPCFTTDHQIARACDDCCGGRGRGRCYGPQCLCR

SEQ ID NO: 971 - protein, 36 aa, synthetic construct
  REGION 1..36: note = Description of Artificial Sequence: Synthetic polypeptide
ICIPCFTTDHQIARRCDDCCGGRGRGRCYGPQCLCR

SEQ ID NO: 972 - protein, 36 aa, synthetic construct
  REGION 1..36: note = Description of Artificial Sequence: Synthetic polypeptide
KCIPCFTTDHQIARRCDDCCGGRGRGRCYGPQCLCR

SEQ ID NO: 973 - protein, 36 aa, synthetic construct
  REGION 1..36: note = Description of Artificial Sequence: Synthetic polypeptide
  SITE 15: note = MOD_RES - Citrulline
  SITE 23: note = MOD_RES - Citrulline
ICIPCFTTDHQIARXCDDCCGGXGRGKCYGPQCLCR

SEQ ID NO: 974 - protein, 36 aa, synthetic construct
  REGION 1..36: note = Description of Artificial Sequence: Synthetic polypeptide
  SITE 15: note = MOD_RES - Citrulline
  SITE 23: note = MOD_RES - Citrulline
  SITE 27: note = MOD_RES - Citrulline
ICIPCFTTDHQIARXCDDCCGGXGRGXCYGPQCLCR

SEQ ID NO: 975 - protein, 36 aa, synthetic construct
  REGION 1..36: note = Description of Artificial Sequence: Synthetic polypeptide
  SITE 15: note = MOD_RES - Citrulline
  SITE 23: note = MOD_RES - Citrulline
  SITE 27: note = MOD_RES - Citrulline
KCIPCFTTDHQIARXCDDCCGGXGRGXCYGPQCLCR

SEQ ID NO: 976 - protein, 36 aa, synthetic construct
  REGION 1..36: note = Description of Artificial Sequence: Synthetic polypeptide
TCTPCFTTDHQTARKCDDCCGGKGRGKCYGPQCLCR

SEQ ID NO: 977 - protein, 36 aa, synthetic construct
  REGION 1..36: note = Description of Artificial Sequence: Synthetic polypeptide
TCTPCFTTDHQTARACDDCCGGKGRGKCYGPQCLCR

SEQ ID NO: 978 - protein, 36 aa, synthetic construct
  REGION 1..36: note = Description of Artificial Sequence: Synthetic polypeptide
TCTPCFTTDHQTARRCDDCCGGKGRGKCYGPQCLCR

SEQ ID NO: 979 - protein, 36 aa, synthetic construct
  REGION 1..36: note = Description of Artificial Sequence: Synthetic polypeptide
TCTPCFTTDHQTARKCDDCCGGAGRGKCYGPQCLCR

SEQ ID NO: 980 - protein, 36 aa, synthetic construct
  REGION 1..36: note = Description of Artificial Sequence: Synthetic polypeptide
TCTPCFTTDHQTARACDDCCGGAGRGKCYGPQCLCR

SEQ ID NO: 981 - protein, 36 aa, synthetic construct
  REGION 1..36: note = Description of Artificial Sequence: Synthetic polypeptide
TCTPCFTTDHQTARRCDDCCGGAGRGKCYGPQCLCR

SEQ ID NO: 982 - protein, 36 aa, synthetic construct
  REGION 1..36: note = Description of Artificial Sequence: Synthetic polypeptide
TCTPCFTTDHQTARKCDDCCGGRGRGKCYGPQCLCR

SEQ ID NO: 983 - protein, 36 aa, synthetic construct
  REGION 1..36: note = Description of Artificial Sequence: Synthetic polypeptide
TCTPCFTTDHQTARACDDCCGGRGRGKCYGPQCLCR

SEQ ID NO: 984 - protein, 36 aa, synthetic construct
  REGION 1..36: note = Description of Artificial Sequence: Synthetic polypeptide
TCTPCFTTDHQTARRCDDCCGGRGRGKCYGPQCLCR

SEQ ID NO: 985 - protein, 36 aa, synthetic construct
  REGION 1..36: note = Description of Artificial Sequence: Synthetic polypeptide
TCTPCFTTDHQTARKCDDCCGGKGRGACYGPQCLCR

SEQ ID NO: 986 - protein, 36 aa, synthetic construct
  REGION 1..36: note = Description of Artificial Sequence: Synthetic polypeptide
TCTPCFTTDHQTARACDDCCGGKGRGACYGPQCLCR

SEQ ID NO: 987 - protein, 36 aa, synthetic construct
  REGION 1..36: note = Description of Artificial Sequence: Synthetic polypeptide
TCTPCFTTDHQTARRCDDCCGGKGRGACYGPQCLCR

SEQ ID NO: 988 - protein, 36 aa, synthetic construct
  REGION 1..36: note = Description of Artificial Sequence: Synthetic polypeptide
TCTPCFTTDHQTARKCDDCCGGAGRGACYGPQCLCR

SEQ ID NO: 989 - protein, 36 aa, synthetic construct
  REGION 1..36: note = Description of Artificial Sequence: Synthetic polypeptide
TCTPCFTTDHQTARACDDCCGGAGRGACYGPQCLCR

SEQ ID NO: 990 - protein, 36 aa, synthetic construct
  REGION 1..36: note = Description of Artificial Sequence: Synthetic polypeptide
TCTPCFTTDHQTARRCDDCCGGAGRGACYGPQCLCR

SEQ ID NO: 991 - protein, 36 aa, synthetic construct
  REGION 1..36: note = Description of Artificial Sequence: Synthetic polypeptide
TCTPCFTTDHQTARKCDDCCGGRGRGACYGPQCLCR

SEQ ID NO: 992 - protein, 36 aa, synthetic construct
  REGION 1..36: note = Description of Artificial Sequence: Synthetic polypeptide
TCTPCFTTDHQTARACDDCCGGRGRGACYGPQCLCR

SEQ ID NO: 993 - protein, 36 aa, synthetic construct
  REGION 1..36: note = Description of Artificial Sequence: Synthetic polypeptide
TCTPCFTTDHQTARRCDDCCGGRGRGACYGPQCLCR

SEQ ID NO: 994 - protein, 36 aa, synthetic construct
  REGION 1..36: note = Description of Artificial Sequence: Synthetic polypeptide
TCTPCFTTDHQTARKCDDCCGGKGRGRCYGPQCLCR

SEQ ID NO: 995 - protein, 36 aa, synthetic construct
  REGION 1..36: note = Description of Artificial Sequence: Synthetic polypeptide
TCTPCFTTDHQTARACDDCCGGKGRGRCYGPQCLCR

SEQ ID NO: 996 - protein, 36 aa, synthetic construct
  REGION 1..36: note = Description of Artificial Sequence: Synthetic polypeptide
TCTPCFTTDHQTARRCDDCCGGKGRGRCYGPQCLCR

SEQ ID NO: 997 - protein, 36 aa, synthetic construct
  REGION 1..36: note = Description of Artificial Sequence: Synthetic polypeptide
TCTPCFTTDHQTARKCDDCCGGAGRGRCYGPQCLCR

SEQ ID NO: 998 - protein, 36 aa, synthetic construct
  REGION 1..36: note = Description of Artificial Sequence: Synthetic polypeptide
TCTPCFTTDHQTARACDDCCGGAGRGRCYGPQCLCR

SEQ ID NO: 999 - protein, 36 aa, synthetic construct
  REGION 1..36: note = Description of Artificial Sequence: Synthetic polypeptide
TCTPCFTTDHQTARRCDDCCGGAGRGRCYGPQCLCR

SEQ ID NO: 1000 - protein, 36 aa, synthetic construct
  REGION 1..36: note = Description of Artificial Sequence: Synthetic polypeptide
TCTPCFTTDHQTARKCDDCCGGRGRGRCYGPQCLCR

SEQ ID NO: 1001 - protein, 36 aa, synthetic construct
  REGION 1..36: note = Description of Artificial Sequence: Synthetic polypeptide
TCTPCFTTDHQTARACDDCCGGRGRGRCYGPQCLCR

SEQ ID NO: 1002 - protein, 36 aa, synthetic construct
  REGION 1..36: note = Description of Artificial Sequence: Synthetic polypeptide
TCTPCFTTDHQTARRCDDCCGGRGRGRCYGPQCLCR

SEQ ID NO: 1003 - protein, 36 aa, synthetic construct
  REGION 1..36: note = Description of Artificial Sequence: Synthetic polypeptide
KCTPCFTTDHQTARRCDDCCGGRGRGRCYGPQCLCR

SEQ ID NO: 1004 - protein, 36 aa, synthetic construct
  REGION 1..36: note = Description of Artificial Sequence: Synthetic polypeptide
  SITE 15: note = MOD_RES - Citrulline
  SITE 23: note = MOD_RES - Citrulline
TCTPCFTTDHQTARXCDDCCGGXGRGKCYGPQCLCR

SEQ ID NO: 1005 - protein, 36 aa, synthetic construct
  REGION 1..36: note = Description of Artificial Sequence: Synthetic polypeptide
  SITE 15: note = MOD_RES - Citrulline
  SITE 23: note = MOD_RES - Citrulline
  SITE 27: note = MOD_RES - Citrulline
TCTPCFTTDHQTARXCDDCCGGXGRGXCYGPQCLCR

SEQ ID NO: 1006 - protein, 36 aa, synthetic construct
  REGION 1..36: note = Description of Artificial Sequence: Synthetic polypeptide
  SITE 15: note = MOD_RES - Citrulline
  SITE 23: note = MOD_RES - Citrulline
  SITE 27: note = MOD_RES - Citrulline
KCTPCFTTDHQTARXCDDCCGGXGRGXCYGPQCLCR

SEQ ID NO: 1007 - protein, 36 aa, synthetic construct
  REGION 1..36: note = Description of Artificial Sequence: Synthetic polypeptide
VCVPCFTTDHQVARKCDDCCGGKGRGKCYGPQCLCR

SEQ ID NO: 1008 - protein, 36 aa, synthetic construct
  REGION 1..36: note = Description of Artificial Sequence: Synthetic polypeptide
VCVPCFTTDHQVARACDDCCGGKGRGKCYGPQCLCR

SEQ ID NO: 1009 - protein, 36 aa, synthetic construct
  REGION 1..36: note = Description of Artificial Sequence: Synthetic polypeptide
VCVPCFTTDHQVARRCDDCCGGKGRGKCYGPQCLCR

SEQ ID NO: 1010 - protein, 36 aa, synthetic construct
  REGION 1..36: note = Description of Artificial Sequence: Synthetic polypeptide
VCVPCFTTDHQVARKCDDCCGGAGRGKCYGPQCLCR

SEQ ID NO: 1011 - protein, 36 aa, synthetic construct
  REGION 1..36: note = Description of Artificial Sequence: Synthetic polypeptide
VCVPCFTTDHQVARACDDCCGGAGRGKCYGPQCLCR

SEQ ID NO: 1012 - protein, 36 aa, synthetic construct
  REGION 1..36: note = Description of Artificial Sequence: Synthetic polypeptide
VCVPCFTTDHQVARRCDDCCGGAGRGKCYGPQCLCR

SEQ ID NO: 1013 - protein, 36 aa, synthetic construct
  REGION 1..36: note = Description of Artificial Sequence: Synthetic polypeptide
VCVPCFTTDHQVARKCDDCCGGRGRGKCYGPQCLCR

SEQ ID NO: 1014 - protein, 36 aa, synthetic construct
  REGION 1..36: note = Description of Artificial Sequence: Synthetic polypeptide
VCVPCFTTDHQVARACDDCCGGRGRGKCYGPQCLCR

SEQ ID NO: 1015 - protein, 36 aa, synthetic construct
  REGION 1..36: note = Description of Artificial Sequence: Synthetic polypeptide
VCVPCFTTDHQVARRCDDCCGGRGRGKCYGPQCLCR

SEQ ID NO: 1016 - protein, 36 aa, synthetic construct
  REGION 1..36: note = Description of Artificial Sequence: Synthetic polypeptide
VCVPCFTTDHQVARKCDDCCGGKGRGACYGPQCLCR

SEQ ID NO: 1017 - protein, 36 aa, synthetic construct
  REGION 1..36: note = Description of Artificial Sequence: Synthetic polypeptide
VCVPCFTTDHQVARACDDCCGGKGRGACYGPQCLCR

SEQ ID NO: 1018 - protein, 36 aa, synthetic construct
  REGION 1..36: note = Description of Artificial Sequence: Synthetic polypeptide
VCVPCFTTDHQVARRCDDCCGGKGRGACYGPQCLCR

SEQ ID NO: 1019 - protein, 36 aa, synthetic construct
  REGION 1..36: note = Description of Artificial Sequence: Synthetic polypeptide
VCVPCFTTDHQVARKCDDCCGGAGRGACYGPQCLCR

SEQ ID NO: 1020 - protein, 36 aa, synthetic construct
  REGION 1..36: note = Description of Artificial Sequence: Synthetic polypeptide
VCVPCFTTDHQVARACDDCCGGAGRGACYGPQCLCR

SEQ ID NO: 1021 - protein, 36 aa, synthetic construct
  REGION 1..36: note = Description of Artificial Sequence: Synthetic polypeptide
VCVPCFTTDHQVARRCDDCCGGAGRGACYGPQCLCR

SEQ ID NO: 1022 - protein, 36 aa, synthetic construct
  REGION 1..36: note = Description of Artificial Sequence: Synthetic polypeptide
VCVPCFTTDHQVARKCDDCCGGRGRGACYGPQCLCR

SEQ ID NO: 1023 - protein, 36 aa, synthetic construct
  REGION 1..36: note = Description of Artificial Sequence: Synthetic polypeptide
VCVPCFTTDHQVARACDDCCGGRGRGACYGPQCLCR

SEQ ID NO: 1024 - protein, 36 aa, synthetic construct
  REGION 1..36: note = Description of Artificial Sequence: Synthetic polypeptide
VCVPCFTTDHQVARRCDDCCGGRGRGACYGPQCLCR

SEQ ID NO: 1025 - protein, 36 aa, synthetic construct
  REGION 1..36: note = Description of Artificial Sequence: Synthetic polypeptide
VCVPCFTTDHQVARKCDDCCGGKGRGRCYGPQCLCR

SEQ ID NO: 1026 - protein, 36 aa, synthetic construct
  REGION 1..36: note = Description of Artificial Sequence: Synthetic polypeptide
VCVPCFTTDHQVARACDDCCGGKGRGRCYGPQCLCR

SEQ ID NO: 1027 - protein, 36 aa, synthetic construct
  REGION 1..36: note = Description of Artificial Sequence: Synthetic polypeptide
VCVPCFTTDHQVARRCDDCCGGKGRGRCYGPQCLCR

SEQ ID NO: 1028 - protein, 36 aa, synthetic construct
  REGION 1..36: note = Description of Artificial Sequence: Synthetic polypeptide
VCVPCFTTDHQVARKCDDCCGGAGRGRCYGPQCLCR

SEQ ID NO: 1029 - protein, 36 aa, synthetic construct
  REGION 1..36: note = Description of Artificial Sequence: Synthetic polypeptide
VCVPCFTTDHQVARACDDCCGGAGRGRCYGPQCLCR

SEQ ID NO: 1030 - protein, 36 aa, synthetic construct
  REGION 1..36: note = Description of Artificial Sequence: Synthetic polypeptide
VCVPCFTTDHQVARRCDDCCGGAGRGRCYGPQCLCR

SEQ ID NO: 1031 - protein, 36 aa, synthetic construct
  REGION 1..36: note = Description of Artificial Sequence: Synthetic polypeptide
VCVPCFTTDHQVARKCDDCCGGRGRGRCYGPQCLCR

SEQ ID NO: 1032 - protein, 36 aa, synthetic construct
  REGION 1..36: note = Description of Artificial Sequence: Synthetic polypeptide
VCVPCFTTDHQVARACDDCCGGRGRGRCYGPQCLCR

SEQ ID NO: 1033 - protein, 36 aa, synthetic construct
  REGION 1..36: note = Description of Artificial Sequence: Synthetic polypeptide
VCVPCFTTDHQVARRCDDCCGGRGRGRCYGPQCLCR

SEQ ID NO: 1034 - protein, 36 aa, synthetic construct
  REGION 1..36: note = Description of Artificial Sequence: Synthetic polypeptide
KCVPCFTTDHQVARRCDDCCGGRGRGRCYGPQCLCR

SEQ ID NO: 1035 - protein, 36 aa, synthetic construct
  REGION 1..36: note = Description of Artificial Sequence: Synthetic polypeptide
  SITE 15: note = MOD_RES - Citrulline
  SITE 23: note = MOD_RES - Citrulline
VCVPCFTTDHQVARXCDDCCGGXGRGKCYGPQCLCR

SEQ ID NO: 1036 - protein, 36 aa, synthetic construct
  REGION 1..36: note = Description of Artificial Sequence: Synthetic polypeptide
  SITE 15: note = MOD_RES - Citrulline
  SITE 23: note = MOD_RES - Citrulline
  SITE 27: note = MOD_RES - Citrulline
VCVPCFTTDHQVARXCDDCCGGXGRGXCYGPQCLCR

SEQ ID NO: 1037 - protein, 36 aa, synthetic construct
  REGION 1..36: note = Description of Artificial Sequence: Synthetic polypeptide
  SITE 15: note = MOD_RES - Citrulline
  SITE 23: note = MOD_RES - Citrulline
  SITE 27: note = MOD_RES - Citrulline
KCVPCFTTDHQVARXCDDCCGGXGRGXCYGPQCLCR

SEQ ID NO: 1038 - protein, 36 aa, synthetic construct
  REGION 1..36: note = Description of Artificial Sequence: Synthetic polypeptide
LCLPCFTTDHQLARKCDDCCGGKGRGKCYGPQCLCR

SEQ ID NO: 1039 - protein, 36 aa, synthetic construct
  REGION 1..36: note = Description of Artificial Sequence: Synthetic polypeptide
LCLPCFTTDHQLARACDDCCGGKGRGKCYGPQCLCR

SEQ ID NO: 1040 - protein, 36 aa, synthetic construct
  REGION 1..36: note = Description of Artificial Sequence: Synthetic polypeptide
LCLPCFTTDHQLARRCDDCCGGKGRGKCYGPQCLCR

SEQ ID NO: 1041 - protein, 36 aa, synthetic construct
  REGION 1..36: note = Description of Artificial Sequence: Synthetic polypeptide
LCLPCFTTDHQLARKCDDCCGGAGRGKCYGPQCLCR

SEQ ID NO: 1042 - protein, 36 aa, synthetic construct
  REGION 1..36: note = Description of Artificial Sequence: Synthetic polypeptide
LCLPCFTTDHQLARACDDCCGGAGRGKCYGPQCLCR

SEQ ID NO: 1043 - protein, 36 aa, synthetic construct
  REGION 1..36: note = Description of Artificial Sequence: Synthetic polypeptide
LCLPCFTTDHQLARRCDDCCGGAGRGKCYGPQCLCR

SEQ ID NO: 1044 - protein, 36 aa, synthetic construct
  REGION 1..36: note = Description of Artificial Sequence: Synthetic polypeptide
LCLPCFTTDHQLARKCDDCCGGRGRGKCYGPQCLCR

SEQ ID NO: 1045 - protein, 36 aa, synthetic construct
  REGION 1..36: note = Description of Artificial Sequence: Synthetic polypeptide
LCLPCFTTDHQLARACDDCCGGRGRGKCYGPQCLCR

SEQ ID NO: 1046 - protein, 36 aa, synthetic construct
  REGION 1..36: note = Description of Artificial Sequence: Synthetic polypeptide
LCLPCFTTDHQLARRCDDCCGGRGRGKCYGPQCLCR

SEQ ID NO: 1047 - protein, 36 aa, synthetic construct
  REGION 1..36: note = Description of Artificial Sequence: Synthetic polypeptide
LCLPCFTTDHQLARKCDDCCGGKGRGACYGPQCLCR

SEQ ID NO: 1048 - protein, 36 aa, synthetic construct
  REGION 1..36: note = Description of Artificial Sequence: Synthetic polypeptide
LCLPCFTTDHQLARACDDCCGGKGRGACYGPQCLCR

SEQ ID NO: 1049 - protein, 36 aa, synthetic construct
  REGION 1..36: note = Description of Artificial Sequence: Synthetic polypeptide
LCLPCFTTDHQLARRCDDCCGGKGRGACYGPQCLCR

SEQ ID NO: 1050 - protein, 36 aa, synthetic construct
  REGION 1..36: note = Description of Artificial Sequence: Synthetic polypeptide
LCLPCFTTDHQLARKCDDCCGGAGRGACYGPQCLCR

SEQ ID NO: 1051 - protein, 36 aa, synthetic construct
  REGION 1..36: note = Description of Artificial Sequence: Synthetic polypeptide
LCLPCFTTDHQLARACDDCCGGAGRGACYGPQCLCR

SEQ ID NO: 1052 - protein, 36 aa, synthetic construct
  REGION 1..36: note = Description of Artificial Sequence: Synthetic polypeptide
LCLPCFTTDHQLARRCDDCCGGAGRGACYGPQCLCR

SEQ ID NO: 1053 - protein, 36 aa, synthetic construct
  REGION 1..36: note = Description of Artificial Sequence: Synthetic polypeptide
LCLPCFTTDHQLARKCDDCCGGRGRGACYGPQCLCR

SEQ ID NO: 1054 - protein, 36 aa, synthetic construct
  REGION 1..36: note = Description of Artificial Sequence: Synthetic polypeptide
LCLPCFTTDHQLARACDDCCGGRGRGACYGPQCLCR

SEQ ID NO: 1055 - protein, 36 aa, synthetic construct
  REGION 1..36: note = Description of Artificial Sequence: Synthetic polypeptide
LCLPCFTTDHQLARRCDDCCGGRGRGACYGPQCLCR

SEQ ID NO: 1056 - protein, 36 aa, synthetic construct
  REGION 1..36: note = Description of Artificial Sequence: Synthetic polypeptide
LCLPCFTTDHQLARKCDDCCGGKGRGRCYGPQCLCR

SEQ ID NO: 1057 - protein, 36 aa, synthetic construct
  REGION 1..36: note = Description of Artificial Sequence: Synthetic polypeptide
LCLPCFTTDHQLARACDDCCGGKGRGRCYGPQCLCR

SEQ ID NO: 1058 - protein, 36 aa, synthetic construct
  REGION 1..36: note = Description of Artificial Sequence: Synthetic polypeptide
LCLPCFTTDHQLARRCDDCCGGKGRGRCYGPQCLCR

SEQ ID NO: 1059 - protein, 36 aa, synthetic construct
  REGION 1..36: note = Description of Artificial Sequence: Synthetic polypeptide
LCLPCFTTDHQLARKCDDCCGGAGRGRCYGPQCLCR

SEQ ID NO: 1060 - protein, 36 aa, synthetic construct
  REGION 1..36: note = Description of Artificial Sequence: Synthetic polypeptide
LCLPCFTTDHQLARACDDCCGGAGRGRCYGPQCLCR

SEQ ID NO: 1061 - protein, 36 aa, synthetic construct
  REGION 1..36: note = Description of Artificial Sequence: Synthetic polypeptide
LCLPCFTTDHQLARRCDDCCGGAGRGRCYGPQCLCR

SEQ ID NO: 1062 - protein, 36 aa, synthetic construct
  REGION 1..36: note = Description of Artificial Sequence: Synthetic polypeptide
LCLPCFTTDHQLARKCDDCCGGRGRGRCYGPQCLCR

SEQ ID NO: 1063 - protein, 36 aa, synthetic construct
  REGION 1..36: note = Description of Artificial Sequence: Synthetic polypeptide
LCLPCFTTDHQLARACDDCCGGRGRGRCYGPQCLCR

SEQ ID NO: 1064 - protein, 36 aa, synthetic construct
  REGION 1..36: note = Description of Artificial Sequence: Synthetic polypeptide
LCLPCFTTDHQLARRCDDCCGGRGRGRCYGPQCLCR

SEQ ID NO: 1065 - protein, 36 aa, synthetic construct
  REGION 1..36: note = Description of Artificial Sequence: Synthetic polypeptide
KCLPCFTTDHQLARRCDDCCGGRGRGRCYGPQCLCR

SEQ ID NO: 1066 - protein, 36 aa, synthetic construct
  REGION 1..36: note = Description of Artificial Sequence: Synthetic polypeptide
  SITE 15: note = MOD_RES - Citrulline
  SITE 23: note = MOD_RES - Citrulline
LCLPCFTTDHQLARXCDDCCGGXGRGKCYGPQCLCR

SEQ ID NO: 1067 - protein, 36 aa, synthetic construct
  REGION 1..36: note = Description of Artificial Sequence: Synthetic polypeptide
  SITE 15: note = MOD_RES - Citrulline
  SITE 23: note = MOD_RES - Citrulline
  SITE 27: note = MOD_RES - Citrulline
LCLPCFTTDHQLARXCDDCCGGXGRGXCYGPQCLCR

SEQ ID NO: 1068 - protein, 36 aa, synthetic construct
  REGION 1..36: note = Description of Artificial Sequence: Synthetic polypeptide
  SITE 15: note = MOD_RES - Citrulline
  SITE 23: note = MOD_RES - Citrulline
  SITE 27: note = MOD_RES - Citrulline
KCLPCFTTDHQLARXCDDCCGGXGRGXCYGPQCLCR

SEQ ID NO: 1069 - protein, 36 aa, synthetic construct
  REGION 1..36: note = Description of Artificial Sequence: Synthetic polypeptide
SCSPCFTTDHQSARKCDDCCGGKGRGKCYGPQCLCR

SEQ ID NO: 1070 - protein, 36 aa, synthetic construct
  REGION 1..36: note = Description of Artificial Sequence: Synthetic polypeptide
SCSPCFTTDHQSARACDDCCGGKGRGKCYGPQCLCR

SEQ ID NO: 1071 - protein, 36 aa, synthetic construct
  REGION 1..36: note = Description of Artificial Sequence: Synthetic polypeptide
SCSPCFTTDHQSARRCDDCCGGKGRGKCYGPQCLCR

SEQ ID NO: 1072 - protein, 36 aa, synthetic construct
  REGION 1..36: note = Description of Artificial Sequence: Synthetic polypeptide
SCSPCFTTDHQSARKCDDCCGGAGRGKCYGPQCLCR

SEQ ID NO: 1073 - protein, 36 aa, synthetic construct
  REGION 1..36: note = Description of Artificial Sequence: Synthetic polypeptide
SCSPCFTTDHQSARACDDCCGGAGRGKCYGPQCLCR

SEQ ID NO: 1074 - protein, 36 aa, synthetic construct
  REGION 1..36: note = Description of Artificial Sequence: Synthetic polypeptide
SCSPCFTTDHQSARRCDDCCGGAGRGKCYGPQCLCR

SEQ ID NO: 1075 - protein, 36 aa, synthetic construct
  REGION 1..36: note = Description of Artificial Sequence: Synthetic polypeptide
SCSPCFTTDHQSARKCDDCCGGRGRGKCYGPQCLCR

SEQ ID NO: 1076 - protein, 36 aa, synthetic construct
  REGION 1..36: note = Description of Artificial Sequence: Synthetic polypeptide
SCSPCFTTDHQSARACDDCCGGRGRGKCYGPQCLCR

SEQ ID NO: 1077 - protein, 36 aa, synthetic construct
  REGION 1..36: note = Description of Artificial Sequence: Synthetic polypeptide
SCSPCFTTDHQSARRCDDCCGGRGRGKCYGPQCLCR

SEQ ID NO: 1078 - protein, 36 aa, synthetic construct
  REGION 1..36: note = Description of Artificial Sequence: Synthetic polypeptide
SCSPCFTTDHQSARKCDDCCGGKGRGACYGPQCLCR

SEQ ID NO: 1079 - protein, 36 aa, synthetic construct
  REGION 1..36: note = Description of Artificial Sequence: Synthetic polypeptide
SCSPCFTTDHQSARACDDCCGGKGRGACYGPQCLCR

SEQ ID NO: 1080 - protein, 36 aa, synthetic construct
  REGION 1..36: note = Description of Artificial Sequence: Synthetic polypeptide
SCSPCFTTDHQSARRCDDCCGGKGRGACYGPQCLCR

SEQ ID NO: 1081 - protein, 36 aa, synthetic construct
  REGION 1..36: note = Description of Artificial Sequence: Synthetic polypeptide
SCSPCFTTDHQSARKCDDCCGGAGRGACYGPQCLCR

SEQ ID NO: 1082 - protein, 36 aa, synthetic construct
  REGION 1..36: note = Description of Artificial Sequence: Synthetic polypeptide
SCSPCFTTDHQSARACDDCCGGAGRGACYGPQCLCR

SEQ ID NO: 1083 - protein, 36 aa, synthetic construct
  REGION 1..36: note = Description of Artificial Sequence: Synthetic polypeptide
SCSPCFTTDHQSARRCDDCCGGAGRGACYGPQCLCR

SEQ ID NO: 1084 - protein, 36 aa, synthetic construct
  REGION 1..36: note = Description of Artificial Sequence: Synthetic polypeptide
SCSPCFTTDHQSARKCDDCCGGRGRGACYGPQCLCR

SEQ ID NO: 1085 - protein, 36 aa, synthetic construct
  REGION 1..36: note = Description of Artificial Sequence: Synthetic polypeptide
SCSPCFTTDHQSARACDDCCGGRGRGACYGPQCLCR

SEQ ID NO: 1086 - protein, 36 aa, synthetic construct
  REGION 1..36: note = Description of Artificial Sequence: Synthetic polypeptide
SCSPCFTTDHQSARRCDDCCGGRGRGACYGPQCLCR

SEQ ID NO: 1087 - protein, 36 aa, synthetic construct
  REGION 1..36: note = Description of Artificial Sequence: Synthetic polypeptide
SCSPCFTTDHQSARKCDDCCGGKGRGRCYGPQCLCR

SEQ ID NO: 1088 - protein, 36 aa, synthetic construct
  REGION 1..36: note = Description of Artificial Sequence: Synthetic polypeptide
SCSPCFTTDHQSARACDDCCGGKGRGRCYGPQCLCR

SEQ ID NO: 1089 - protein, 36 aa, synthetic construct
  REGION 1..36: note = Description of Artificial Sequence: Synthetic polypeptide
SCSPCFTTDHQSARRCDDCCGGKGRGRCYGPQCLCR

SEQ ID NO: 1090 - protein, 36 aa, synthetic construct
  REGION 1..36: note = Description of Artificial Sequence: Synthetic polypeptide
SCSPCFTTDHQSARKCDDCCGGAGRGRCYGPQCLCR

SEQ ID NO: 1091 - protein, 36 aa, synthetic construct
  REGION 1..36: note = Description of Artificial Sequence: Synthetic polypeptide
SCSPCFTTDHQSARACDDCCGGAGRGRCYGPQCLCR

SEQ ID NO: 1092 - protein, 36 aa, synthetic construct
  REGION 1..36: note = Description of Artificial Sequence: Synthetic polypeptide
SCSPCFTTDHQSARRCDDCCGGAGRGRCYGPQCLCR

SEQ ID NO: 1093 - protein, 36 aa, synthetic construct
  REGION 1..36: note = Description of Artificial Sequence: Synthetic polypeptide
SCSPCFTTDHQSARKCDDCCGGRGRGRCYGPQCLCR

SEQ ID NO: 1094 - protein, 36 aa, synthetic construct
  REGION 1..36: note = Description of Artificial Sequence: Synthetic polypeptide
SCSPCFTTDHQSARACDDCCGGRGRGRCYGPQCLCR

SEQ ID NO: 1095 - protein, 36 aa, synthetic construct
  REGION 1..36: note = Description of Artificial Sequence: Synthetic polypeptide
SCSPCFTTDHQSARRCDDCCGGRGRGRCYGPQCLCR

SEQ ID NO: 1096 - protein, 36 aa, synthetic construct
  REGION 1..36: note = Description of Artificial Sequence: Synthetic polypeptide
KCSPCFTTDHQSARRCDDCCGGRGRGRCYGPQCLCR

SEQ ID NO: 1097 - protein, 36 aa, synthetic construct
  REGION 1..36: note = Description of Artificial Sequence: Synthetic polypeptide
  SITE 15: note = MOD_RES - Citrulline
  SITE 23: note = MOD_RES - Citrulline
SCSPCFTTDHQSARXCDDCCGGXGRGKCYGPQCLCR

SEQ ID NO: 1098 - protein, 36 aa, synthetic construct
  REGION 1..36: note = Description of Artificial Sequence: Synthetic polypeptide
  SITE 15: note = MOD_RES - Citrulline
  SITE 23: note = MOD_RES - Citrulline
  SITE 27: note = MOD_RES - Citrulline
SCSPCFTTDHQSARXCDDCCGGXGRGXCYGPQCLCR

SEQ ID NO: 1099 - protein, 36 aa, synthetic construct
  REGION 1..36: note = Description of Artificial Sequence: Synthetic polypeptide
  SITE 15: note = MOD_RES - Citrulline
  SITE 23: note = MOD_RES - Citrulline
  SITE 27: note = MOD_RES - Citrulline
KCSPCFTTDHQSARXCDDCCGGXGRGXCYGPQCLCR

SEQ ID NO: 1100 - protein, 36 aa, synthetic construct
  REGION 1..36: note = Description of Artificial Sequence: Synthetic polypeptide
MCMPCFTTDPNMARKCRDCCGGNGKCFGPQCLCNRG

SEQ ID NO: 1101 - protein, 36 aa, synthetic construct
  REGION 1..36: note = Description of Artificial Sequence: Synthetic polypeptide
MCMPCFTTDHNMAKKCRDCCGGNGKCFGYQCLCNRG

SEQ ID NO: 1102 - protein, 36 aa, synthetic construct
  REGION 1..36: note = Description of Artificial Sequence: Synthetic polypeptide
MCMPCFTTDHQTARRCRDCCGGRGRKCFGQCLCGYD

SEQ ID NO: 1103 - protein, 36 aa, synthetic construct
  REGION 1..36: note = Description of Artificial Sequence: Synthetic polypeptide
ACGPCFTTDPQMAEKCSDCCGGIGTCYGPQCLCNRL

SEQ ID NO: 1104 - protein, 34 aa, synthetic construct
  REGION 1..34: note = Description of Artificial Sequence: Synthetic polypeptide
MCMPCFTTRPNMAQQCRDCCRGRGKCFGPQCLCG

SEQ ID NO: 1105 - protein, 36 aa, synthetic construct
  REGION 1..36: note = Description of Artificial Sequence: Synthetic polypeptide
MCMPCFTTRPNMAQQCRDCCRGRGKCFGPQCLCGYD

SEQ ID NO: 1106 - protein, 34 aa, synthetic construct
  REGION 1..34: note = Description of Artificial Sequence: Synthetic polypeptide
MCMPCFTTNLNMEQECRDCCGGTGRCFGPQCLCG

SEQ ID NO: 1107 - protein, 36 aa, synthetic construct
  REGION 1..36: note = Description of Artificial Sequence: Synthetic polypeptide
GCMPCFTTDRYMARKCKECCRGYGNCFGPQCLCNRG

SEQ ID NO: 1108 - protein, 36 aa, synthetic construct
  REGION 1..36: note = Description of Artificial Sequence: Synthetic polypeptide
GCGPCFTTDANMARKCRECCGGNGKCFGPQCLCNRE

SEQ ID NO: 1109 - protein, 36 aa, synthetic construct
  REGION 1..36: note = Description of Artificial Sequence: Synthetic polypeptide
GCGPCFTTDANMARKCRECCGGIGKCFGPQCLCNRI

SEQ ID NO: 1110 - protein, 34 aa, synthetic construct
  REGION 1..34: note = Description of Artificial Sequence: Synthetic polypeptide
MCMPCFTTRPDMAQQCRACCKGRGKCFGPQCLCG

SEQ ID NO: 1111 - protein, 34 aa, synthetic construct
  REGION 1..34: note = Description of Artificial Sequence: Synthetic polypeptide
MCIPCFTTNPNMAAKCNACCGSRRGSCRGPQCIC

SEQ ID NO: 1112 - protein, 35 aa, synthetic construct [sequence omitted]

SEQ ID NO: 1113 - protein, 34 aa, synthetic construct
  REGION 1..34: note = Description of Artificial Sequence: Synthetic polypeptide
CGPCFTTDPYTESKCATCCGGRGKCVGPQCLCNR

SEQ ID NO: 1114 - protein, 35 aa, synthetic construct
  REGION 1..35: note = Description of Artificial Sequence: Synthetic polypeptide
RCGPCFTTDPQTQAKCSECCGRKGGVCKGPQCICG

SEQ ID NO: 1115 - protein, 35 aa, synthetic construct
  REGION 1..35: note = Description of Artificial Sequence: Synthetic polypeptide
CGPCFTKDPETEKKCATCCGGIGRCFGPQCLCNRG

SEQ ID NO: 1116 - protein, 36 aa, synthetic construct
  REGION 1..36: note = Description of Artificial Sequence: Synthetic polypeptide
MCMPCFTTDHQMARRCDDCCGGRGRGKCWGPQCLCR

SEQ ID NO: 1117 - protein, 37 aa, synthetic construct
  REGION 1..37: note = Description of Artificial Sequence: Synthetic polypeptide
AMCMPCFTTDHNMAKKCRDCCGGNGKCFGPQCLCNRG

SEQ ID NO: 1118 - protein, 35 aa, synthetic construct
  REGION 1..35: note = Description of Artificial Sequence: Synthetic polypeptide
CGPCFTTDWESEKKCAECCGGIGRCFGPQCLCNRK

SEQ ID NO: 1119 - protein, 34 aa, synthetic construct
  REGION 1..34: note = Description of Artificial Sequence: Synthetic polypeptide
CGPCFTTDHQTEQKCAECCGGIGKCYGPQCLCRG

SEQ ID NO: 1120 - protein, 34 aa, synthetic construct
  REGION 1..34: note = Description of Artificial Sequence: Synthetic polypeptide
CGPCFTTDRQMEQKCAECCGGIGKCYGPQCLCRG

SEQ ID NO: 1121 - protein, 32 aa, synthetic construct
  REGION 1..32: note = Description of Artificial Sequence: Synthetic polypeptide
CGPCFTTDHQTEQKCAECCGGIGKCYGPQCLC

SEQ ID NO: 1122 - protein, 34 aa, synthetic construct
  REGION 1..34: note = Description of Artificial Sequence: Synthetic polypeptide
CMPCFTTDHQMARKCDDCCGGRGKCYGPQCLCRG

SEQ ID NO: 1123 - protein, 37 aa, synthetic construct
  REGION 1..37: note = Description of Artificial Sequence: Synthetic polypeptide
RCGPCFTTDPQTQAKCSECCGRKGGVCKGPQCICGIQ

SEQ ID NO: 1124 - protein, 35 aa, synthetic construct
  REGION 1..35: note = Description of Artificial Sequence: Synthetic polypeptide
RCPPCFTTNPNMEADCRKCCGGRGYCASYQCICPG

SEQ ID NO: 1125 - protein, 35 aa, synthetic construct
  REGION 1..35: note = Description of Artificial Sequence: Synthetic polypeptide
CGPCFTTDHNMARKCDECCGGKGRGKCFGPQCLCR

SEQ ID NO: 1126 - protein, 36 aa, synthetic construct
  REGION 1..36: note = Description of Artificial Sequence: Synthetic polypeptide
VCMPCFTTDQQMARKCSDCCGGKGRGKCYGPQCLCR

SEQ ID NO: 1127 - protein, 36 aa, synthetic construct
  REGION 1..36: note = Description of Artificial Sequence: Synthetic polypeptide
MCGPCFTTDANMARKCRECCGGIGKCFGPQCLCNRI

SEQ ID NO: 1128 - protein, 36 aa, synthetic construct
  REGION 1..36: note = Description of Artificial Sequence: Synthetic polypeptide
MCGPCFTTDANMAAACRECCGGIGKCFGPQCLCNRI

SEQ ID NO: 1129 - protein, 36 aa, synthetic construct
  REGION 1..36: note = Description of Artificial Sequence: Synthetic polypeptide
MCGPCFTTDANMARKCAECCGGIGKCFGPQCLCNRI

SEQ ID NO: 1130 - protein, 36 aa, synthetic construct
  REGION 1..36: note = Description of Artificial Sequence: Synthetic polypeptide
MCGPCFTTDANMARKCRECCGGIGACFGPQCLCNRI

SEQ ID NO: 1131 - protein, 36 aa, synthetic construct
  REGION 1..36: note = Description of Artificial Sequence: Synthetic polypeptide
MCGPCFTTDANMARKCRECCGGIGKCFGPQCLCNAI

SEQ ID NO: 1132 - protein, 35 aa, synthetic construct
  REGION 1..35: note = Description of Artificial Sequence: Synthetic polypeptide
CMPCFTTRPNMAQQCRDCCRGRGKCFGPQCLCGYD

SEQ ID NO: 1133 - protein, 36 aa, synthetic construct
  REGION 1..36: note = Description of Artificial Sequence: Synthetic polypeptide
MCMPCFTTNLNMEQECRDCCGGTGRCFGPQCLCGYD

SEQ ID NO: 1134 - protein, 35 aa, synthetic construct; identical to SEQ ID NO: 1132
  REGION 1..35: note = Description of Artificial Sequence: Synthetic polypeptide

SEQ ID NO: 1135 - protein, 210 aa, synthetic construct
  REGION 1..210: note = Description of Artificial Sequence: Synthetic polypeptide
ITCPPPMSVEHADIWVKSYSLYSRERYICNSGFKRKAGTSSLTECVLNKATNVAHWTTPSLKCIRDPALVHQRPAPPGGSGGGGSGGGSGGGGSLQNWVNVISDLKKIEDLIQSMHIDATLYTESDVHPSCKVTAMKCFLLELQVISLESGDASIHDTVENLIILANNSLSSNGNVTESGCKECEELEEKNIKEFLQSFVHIVQMFINTS

SEQ ID NO: 1136 - protein, 217 aa, synthetic construct
  REGION 1..217: note = Description of Artificial Sequence: Synthetic polypeptide
NWVNVISDLKKIEDLIQSMHIDATLYTESDVHPSCKVTAMKCFLLELQVISLESGDASIHDTVENLIILANNSLSSNGNVTESGCKECEELEEKNIKEFLQSFVHIVQMFINTSSGGGSGGGGSGGGGSGGGGSGGGSLQITCPPPMSVEHADIWVKSYSLYSRERYICNSGFKRKAGTSSLTECVLNKATNVAHWTTPSLKCIRDPALVHQRPAPP

SEQ ID NO: 1137 - protein, 210 aa, synthetic construct
  REGION 1..210: note = Description of Artificial Sequence: Synthetic polypeptide
ITCPPPMSVEHADIWVKSYSLYSRERYICNSGFKRKAGTSSLTECVLNKATNVAHWTTPSLKCIRDPALVHQRPAPPGGSGGGGSGGGSGGGGSLQNWVNVISDLKKIEDLIQSMHIDATLYTESDVHPSCKVTAMKCFLLELQVISLESGDASIHDTVENLIILANDSLSSNGNVTESGCKECEELEEKNIKEFLQSFVHIVQMFINTS

SEQ ID NO: 1138 - protein, 217 aa, synthetic construct
  REGION 1..217: note = Description of Artificial Sequence: Synthetic polypeptide
NWVNVISDLKKIEDLIQSMHIDATLYTESDVHPSCKVTAMKCFLLELQVISLESGDASIHDTVENLIILANDSLSSNGNVTESGCKECEELEEKNIKEFLQSFVHIVQMFINTSSGGGSGGGGSGGGGSGGGGSGGGSLQITCPPPMSVEHADIWVKSYSLYSRERYICNSGFKRKAGTSSLTECVLNKATNVAHWTTPSLKCIRDPALVHQRPAPP

SEQ ID NO: 1139-1153 - skipped (15 entries)

SEQ ID NO: 1154 - protein, 8 aa, synthetic construct
  REGION 1..8: note = Description of Artificial Sequence: Synthetic peptide
GPQGIAGQ

SEQ ID NO: 1155 - protein, 8 aa, synthetic construct
  REGION 1..8: note = Description of Artificial Sequence: Synthetic peptide
GPQGIFGQ

SEQ ID NO: 1156 - protein, 8 aa, synthetic construct
  REGION 1..8: note = Description of Artificial Sequence: Synthetic peptide
GPQGIWGQ

SEQ ID NO: 1157 - protein, 8 aa, synthetic construct
  REGION 1..8: note = Description of Artificial Sequence: Synthetic peptide
GPQGILGQ

SEQ ID NO: 1158 - protein, 8 aa, synthetic construct
  REGION 1..8: note = Description of Artificial Sequence: Synthetic peptide
GPQGIRGQ

SEQ ID NO: 1159 - protein, 8 aa, synthetic construct
  REGION 1..8: note = Description of Artificial Sequence: Synthetic peptide
GPLGIAGQ

SEQ ID NO: 1160 - protein, 8 aa, synthetic construct
  REGION 1..8: note = Description of Artificial Sequence: Synthetic peptide
GPMGIAGQ

SEQ ID NO: 1161 - protein, 8 aa, synthetic construct
  REGION 1..8: note = Description of Artificial Sequence: Synthetic peptide
GPYGIAGQ

SEQ ID NO: 1162 - protein, 12 aa, synthetic construct
  REGION 1..12: note = Description of Artificial Sequence: Synthetic peptide
DYKDDDDKIEGR

SEQ ID NO: 1163 - protein, 19 aa, synthetic construct
  REGION 1..19: note = Description of Artificial Sequence: Synthetic peptide
GGSGGGGSGGGSGGGGSLQ

SEQ ID NO: 1164 - protein, 17 aa, synthetic construct
  REGION 1..17: note = Description of Artificial Sequence: Synthetic peptide
GGSGGGGSGGGSGGGGS

SEQ ID NO: 1165 - protein, 26 aa, synthetic construct
  REGION 1..26: note = Description of Artificial Sequence: Synthetic peptide
SGGGSGGGGSGGGGSGGGGSGGGSLQ

SEQ ID NO: 1166 - protein, 24 aa, synthetic construct
  REGION 1..24: note = Description of Artificial Sequence: Synthetic peptide
SGGGSGGGGSGGGGSGGGGSGGGS

SEQ ID NO: 1167 - protein, 50 aa, synthetic construct
  REGION 1..50: note = Description of Artificial Sequence: Synthetic polypeptide
  VARIANT 1..50: note = MISC_FEATURE - This sequence may encompass 1-10 GGGGS repeating units
GGGGSGGGGSGGGGSGGGGSGGGGSGGGGSGGGGSGGGGSGGGGSGGGGS

SEQ ID NO: 1168 - skipped

SEQ ID NO: 1169 - protein, 20 aa, synthetic construct
  REGION 1..20: note = Description of Artificial Sequence: Synthetic peptide
SGGSGGGGSGGGSGGGGSLQ

SEQ ID NO: 1170 - protein, 4 aa, synthetic construct
  REGION 1..4: note = Description of Artificial Sequence: Synthetic peptide
GGGS

SEQ ID NO: 1171 - protein, 8 aa, synthetic construct
  REGION 1..8: note = Description of Artificial Sequence: Synthetic peptide
GGGSGGGS

SEQ ID NO: 1172 - protein, 40 aa, synthetic construct
  REGION 1..40: note = Description of Artificial Sequence: Synthetic polypeptide
  VARIANT 1..40: note = MISC_FEATURE - This sequence may encompass 1-10 GGGS repeating units
GGGSGGGSGGGSGGGSGGGSGGGSGGGSGGGSGGGSGGGS

SEQ ID NO: 1173 - protein, 338 aa, synthetic construct
  REGION 1..338: note = Description of Artificial Sequence: Synthetic polypeptide
  VARIANT 253..302: note = MOD_RES - This region may encompass one of the following sequences: VA or VK or VR or V-Cit or FK or MK or NK or IP or GI or GL or GY or GM or MI or AI or PI or GPQGIAGQ or GPQGIFGQ or GPQGIWGQ or GPQG or ILGQ or GPQGIRGQ or GPLGIAGQ or GPMGIAGQ or GPYGIAGQ or DYKDDDDKIEGR or GGSGGG GSGGGSGGGGSLQ or GGSGGGGSGGGSGGGGS or SGGGSGGGGSG GGGSGGGGSGGGSLQ or SGGGSGGGGSGGGGSGGGGSGGGS or GG or GGSGGGGSGGGGSGGGGSGGGGSGGGGSGGGGSGGGG SGGGGSGGGGS, this region may encompass 1-10 GGGGS repeating units or GS or SGGSGGGGSGGGSGGGGSLQ or GGGS or GGGSGGGS or GGGSGGGSGGGS or GGGSGGGSGGGSGGGSGGGSGGGSGGGS, this region may encompass 1-10 GGGS repeating units or GSVAGS or GGGGSVAGGGGS or GGGGSGGGGSVAGGGGSGGGG S or GGGGSGGGGSPLGLAGGGGGSGGGGS or AEAAAKEAAAKAVAAEAAAKEAAAKA
  VARIANT 253..302: note = MOD_RES - Any amino acid or absent
  REGION 1..338: note = See specification as filed for detailed description of substitutions and preferred embodiments
MAPRRARGCRTLGLPALLLLLLLRPPATRGDYKDDDDKIEGRITCPPPMSVEHADIWVKSYSLYSRERYICNSGFKRKAGTSSLTECVLNKATNVAHWTTPSLKCIRDPALVHQRPAPPGGSGGGGSGGGSGGGGSLQNWVNVISDLKKIEDLIQSMHIDATLYTESDVHPSCKVTAMKCFLLELQVISLESGDASIHDTVENLIILANNSLSSNGNVTESGCKECEELEEKNIKEFLQSFVHIVQMFINTSXXXXXXXXXXXXXXXXXXXXXXXXXXXXXXXXXXXXXXXXXXXXXXXXXXMCMPCFTTDHQMARKCDDCCGGKGRGKCYGPQCLCR

SEQ ID NO: 1174 - protein, 345 aa, synthetic construct
  REGION 1..345: note = Description of Artificial Sequence: Synthetic polypeptide
  VARIANT 260..309: note = MOD_RES - This region may encompass one of the following sequences: VA or VK or VR or V-Cit or FK or MK or NK or IP or GI or GL or GY or GM or MI or AI or PI or GPQGIAGQ or GPQGIFGQ or GPQGIWGQ or GPQG or ILGQ or GPQGIRGQ or GPLGIAGQ or GPMGIAGQ or GPYGIAGQ or DYKDDDDKIEGR or GGSGGG GSGGGSGGGGSLQ or GGSGGGGSGGGSGGGGS or SGGGSGGGGSG GGGSGGGGSGGGSLQ or SGGGSGGGGSGGGGSGGGGSGGGS or GG or GGSGGGGSGGGGSGGGGSGGGGSGGGGSGGGGSGGGG SGGGGSGGGGS, this region may encompass 1-10 GGGGS repeating units or GS or SGGSGGGGSGGGSGGGGSLQ or GGGS or GGGSGGGS or GGGSGGGSGGGS or GGGSGGGSGGGSGGGSGGGSGGGSGGGS, this region may encompass 1-10 GGGS repeating units or GSVAGS or GGGGSVAGGGGS or GGGGSGGGGSVAGGGGSGGGG S or GGGGSGGGGSPLGLAGGGGGSGGGGS or AEAAAKEAAAKAVAAEAAAKEAAAKA
  VARIANT 260..309: note = MOD_RES - Any amino acid or absent
  REGION 1..345: note = See specification as filed for detailed description of substitutions and preferred embodiments
MAPRRARGCRTLGLPALLLLLLLRPPATRGDYKDDDDKIEGRNWVNVISDLKKIEDLIQSMHIDATLYTESDVHPSCKVTAMKCFLLELQVISLESGDASIHDTVENLIILANNSLSSNGNVTESGCKECEELEEKNIKEFLQSFVHIVQMFINTSSGGGSGGGGSGGGGSGGGGSGGGSLQITCPPPMSVEHADIWVKSYSLYSRERYICNSGFKRKAGTSSLTECVLNKATNVAHWTTPSLKCIRDPALVHQRPAPPXXXXXXXXXXXXXXXXXXXXXXXXXXXXXXXXXXXXXXXXXXXXXXXXXXMCMPCFTTDHQMARKCDDCCGGKGRGKCYGPQCLCR

SEQ ID NO: 1175 - skipped

SEQ ID NO: 1176 - protein, 77 aa, Homo sapiens
ITCPPPMSVEHADIWVKSYSLYSRERYICNSGFKRKAGTSSLTECVLNKATNVAHWTTPSLKCIRDPALVHQRPAPP

SEQ ID NO: 1177 - protein, 114 aa, Homo sapiens
NWVNVISDLKKIEDLIQSMHIDATLYTESDVHPSCKVTAMKCFLLELQVISLESGDASIHDTVENLIILANNSLSSNGNVTESGCKECEELEEKNIKEFLQSFVHIVQMFINTS

SEQ ID NO: 1178 - protein, 114 aa, synthetic construct
  REGION 1..114: note = Description of Artificial Sequence: Synthetic polypeptide
NWVNVISDLKKIEDLIQSMHIDATLYTESDVHPSCKVTAMKCFLLELQVISLESGDASIHDTVENLIILANDSLSSNGNVTESGCKECEELEEKNIKEFLQSFVHIVQMFINTS

SEQ ID NO: 1179 - protein, 297 aa, synthetic construct
  REGION 1..297: note = Description of Artificial Sequence: Synthetic polypeptide
ITCPPPMSVEHADIWVKSYSLYSRERYICNSGFKRKAGTSSLTECVINKATNVAHWTTPSLKCIREPKSCDKTHTCPPCPAPELLGGPSVFLFPPKPKDTLMISRTPEVTCVVVDVSHEDPEVKFNWYVDGVEVHNAKTKPREEQYNSTYRVVSVLTVLHQDWLNGKEYKCKVSNKALPAPIEKTISKAKGQPREPQVYTLPPSRDELTKNQVSLTCLVKGFYPSDIAVEWESNGQPENNYKTTPPVLDSDGSFFLYSKLTVDKSRWQQGNVFSCSVMHEALHNHYTQKSLSLSPGK

SEQ ID NO: 1180 - RNA, 24 nt, synthetic construct
  misc_feature 1..24: note = Description of Artificial Sequence: Synthetic oligonucleotide
  source 1..24: mol_type = other RNA
gacacacacacacacacacacttt

SEQ ID NO: 1181 - RNA, 24 nt, synthetic construct
  misc_feature 1..24: note = Description of Artificial Sequence: Synthetic oligonucleotide
  source 1..24: mol_type = other RNA
aaagtgtgtgtgtgtgtgtgtgtc

SEQ ID NO: 1182 - RNA, 24 nt, synthetic construct
  misc_feature 1..24: note = Description of Artificial Sequence: Synthetic oligonucleotide
  source 1..24: mol_type = other RNA
aacacacacacacacacacacttt

SEQ ID NO: 1183 - RNA, 24 nt, synthetic construct
  misc_feature 1..24: note = Description of Artificial Sequence: Synthetic oligonucleotide
  source 1..24: mol_type = other RNA
aaagtgtgtgtgtgtgtgtgtgtt

SEQ ID NO: 1184 - RNA, 30 nt, synthetic construct
  misc_feature 1..30: note = Description of Artificial Sequence: Synthetic oligonucleotide
  source 1..30: mol_type = other RNA
gacgacgacgacgacgacgacgacgacgac

SEQ ID NO: 1185 - RNA, 30 nt, synthetic construct
  misc_feature 1..30: note = Description of Artificial Sequence: Synthetic oligonucleotide
  source 1..30: mol_type = other RNA
gtcgtcgtcgtcgtcgtcgtcgtcgtcgtc

SEQ ID NO: 1186 - RNA, 24 nt, synthetic construct
  misc_feature 1..24: note = Description of Artificial Sequence: Synthetic oligonucleotide
  source 1..24: mol_type = other RNA
gacgctgaccctgaagttcatctt

SEQ ID NO: 1187 - RNA, 24 nt, synthetic construct
  misc_feature 1..24: note = Description of Artificial Sequence: Synthetic oligonucleotide
  source 1..24: mol_type = other RNA
aagatgaacttcagggtcagcgtc

SEQ ID NO: 1188 - RNA, 78 nt, synthetic construct
  misc_feature 1..78: note = Description of Artificial Sequence: Synthetic oligonucleotide
  source 1..78: mol_type = other RNA
gacgcttaacaaataaacaacaaaaatgagaaaaacaatcatatgtctgttttttctttgatctggttgttaagcgtc

SEQ ID NO: 1189 - RNA, 31 nt, synthetic construct
  misc_feature 1..31: note = Description of Artificial Sequence: Synthetic oligonucleotide
  source 1..31: mol_type = other RNA
ggcaaaagcagggagacaaagacaaaaaggc

SEQ ID NO: 1190 - RNA, 31 nt, synthetic construct
  misc_feature 1..31: note = Description of Artificial Sequence: Synthetic oligonucleotide
  source 1..31: mol_type = other RNA
gcctttttgtctttgtctccctgcttttgcc

SEQ ID NO: 1191 - RNA, 31 nt, synthetic construct
  misc_feature 1..31: note = Description of Artificial Sequence: Synthetic oligonucleotide
  source 1..31: mol_type = other RNA
gggagaaacaagggcggcaacaaccaacaaa

SEQ ID NO: 1192 - RNA, 20 nt, synthetic construct
  misc_feature 1..20: note = Description of Artificial Sequence: Synthetic oligonucleotide
  source 1..20: mol_type = other RNA
aattttaccttgtttctccc

SEQ ID NO: 1193 - RNA, 71 nt, synthetic construct
  misc_feature 1..71: note = Description of Artificial Sequence: Synthetic oligonucleotide
  source 1..71: mol_type = other RNA
agtagaaacaagggtatttttctttaattgtcgtactcctcactcagtgagtgatctaccctgcttttgct

SEQ ID NO: 1194 - RNA, 63 nt, synthetic construct
  misc_feature 1..63: note = Description of Artificial Sequence: Synthetic oligonucleotide
  source 1..63: mol_type = other RNA
accaaacaaagatttggtgaatgacgagactacacatcgtaactcaccgattctctgtttggt

SEQ ID NO: 1195 - RNA, 29 nt, synthetic construct
  misc_feature 1..29: note = Description of Artificial Sequence: Synthetic oligonucleotide
  source 1..29: mol_type = other RNA
accagacaagagtttatctcttgtttggt

SEQ ID NO: 1196 - RNA, 34 nt, synthetic construct
  misc_feature 1..34: note = Description of Artificial Sequence: Synthetic oligonucleotide
  source 1..34: mol_type = other RNA
gagcagaaacaaggcttcggccttgtttctgctc

SEQ ID NO: 1197 - RNA, 56 nt, synthetic construct
  misc_feature 1..56: note = Description of Artificial Sequence: Synthetic oligonucleotide
  source 1..56: mol_type = other RNA
gggacgctgacccagaagatctactagaaatagtagatcttctgggtcagcgtccc

SEQ ID NO: 1198 - RNA, 40 nt, synthetic construct
  misc_feature 1..40: note = Description of Artificial Sequence: Synthetic oligonucleotide
  source 1..40: mol_type = other RNA
ggctagcgacctctgtttgatcaaacagaggtcgcatgcc

SEQ ID NO: 1199 - RNA, 71 nt, synthetic construct
  misc_feature 1..71: note = Description of Artificial Sequence: Synthetic oligonucleotide
  source 1..71: mol_type = other RNA
gggaggacgatgcggtacctgacagcatcttgataatggtcctacggagccgttccagacgactcgcccga

SEQ ID NO: 1200 - RNA, 93 nt, synthetic construct
  misc_feature 1..93: note = Description of Artificial Sequence: Synthetic oligonucleotide
  source 1..93: mol_type = other RNA
ggcgctccgaccttagtctctgtgccgctataatgcacggatttaatcgccgtagaaaagcatgtcaaagccggaaccgtgtagcacagcaga

SEQ ID NO: 1201 - RNA, 60 nt, synthetic construct
  misc_feature 1..60: note = Description of Artificial Sequence: Synthetic oligonucleotide
  source 1..60: mol_type = other RNA
gggaggtggacgaactgccctcagctactttcatgttgctgacgcacagacgactcgctg

SEQ ID NO: 1202 - RNA, 40 nt, synthetic construct
  misc_feature 1..40: note = Description of Artificial Sequence: Synthetic oligonucleotide
  source 1..40: mol_type = other RNA
gggaggtggacgaactgccctacgcacagacgactcgctg

SEQ ID NO: 1203 - RNA, 23 nt, synthetic construct
  misc_feature 1..23: note = Description of Artificial Sequence: Synthetic oligonucleotide
  source 1..23: mol_type = other RNA
ggatgcggtacctgacagcatcc

SEQ ID NO: 1204 - RNA, 23 nt, synthetic construct
  misc_feature 1..23: note = Description of Artificial Sequence: Synthetic oligonucleotide
  source 1..23: mol_type = other RNA
ggatgctgtcaggtaccgcatcc

SEQ ID NO: 1205 - RNA, 140 nt, synthetic construct
  misc_feature 1..140: note = Description of Artificial Sequence: Synthetic polynucleotide
  source 1..140: mol_type = other RNA
ggctatactgcggactatttggcaaaggaagcattgacacatgcgccaaatttgcctgctctaccaaggcaataggaagaaccatcttgaaagagaatatcaagtacgaagtggccatttttgtccatggaccaactacc

SEQ ID NO: 1206 - RNA, 140 nt, synthetic construct
  misc_feature 1..140: note = Description of Artificial Sequence: Synthetic polynucleotide
  source 1..140: mol_type = other RNA
ggtagttggtccatggacaaaaatggccacttcgtacttgatattctctttcaagatggttcttcctattgccttggtagagcaggcaaatttggcgcatgtgtcaatgcttcctttgccaaatagtccgcagtatagcc

SEQ ID NO: 1207 - protein, 13 aa, synthetic construct
  REGION 1..13: note = Description of Artificial Sequence: Synthetic peptide
GRKKRRQRRRPPQ

SEQ ID NO: 1208 - protein, 16 aa, synthetic construct
  REGION 1..16: note = Description of Artificial Sequence: Synthetic peptide
RQIKIWFQNRRMKWKK

SEQ ID NO: 1209 - protein, 18 aa, synthetic construct
  REGION 1..18: note = Description of Artificial Sequence: Synthetic peptide
LLIILRRRIRKQAHAHSK

SEQ ID NO: 1210 - protein, 27 aa, synthetic construct
  REGION 1..27: note = Description of Artificial Sequence: Synthetic peptide
GWTLNSAGYLLGKINLKALAALAKKIL

SEQ ID NO: 1211 - protein, 27 aa, synthetic construct
  REGION 1..27: note = Description of Artificial Sequence: Synthetic peptide
GALFLGFLGAAGSTMGAWSQPKKKRKV

SEQ ID NO: 1212 - protein, 21 aa, synthetic construct
  REGION 1..21: note = Description of Artificial Sequence: Synthetic peptide
KETWWETWWTEWSQPKKKRKV

SEQ ID NO: 1213 - protein, 18 aa, synthetic construct
  REGION 1..18: note = Description of Artificial Sequence: Synthetic peptide
KLALKLALKALKAALKLA

SEQ ID NO: 1214 - protein, 9 aa, synthetic construct
  REGION 1..9: note = Description of Artificial Sequence: Synthetic peptide
RRWWRRWRR

SEQ ID NO: 1215 - protein, 16 aa, synthetic construct
  REGION 1..16: note = Description of Artificial Sequence: Synthetic peptide
DVVRVWFCNRRQKGKR

SEQ ID NO: 1216 - protein, 27 aa, synthetic construct
  REGION 1..27: note = Description of Artificial Sequence: Synthetic peptide
KDCERRFSRSDQLKRHQRRHTGVKPFQ

SEQ ID NO: 1217 - protein, 16 aa, synthetic construct
  REGION 1..16: note = Description of Artificial Sequence: Synthetic peptide
RKKRRRESRKKRRRES

SEQ ID NO: 1218 - protein, 34 aa, synthetic construct
  REGION 1..34: note = Description of Artificial Sequence: Synthetic polypeptide
DAATATRGRSAASRPTERPRAPARSASRPRRPVE

SEQ ID NO: 1219 - protein, 7 aa, synthetic construct
  REGION 1..7: note = Description of Artificial Sequence: Synthetic peptide
KRKRWHW

SEQ ID NO: 1220 - protein, 12 aa, synthetic construct
  REGION 1..12: note = Description of Artificial Sequence: Synthetic peptide
AAVLLPVLLAAP

SEQ ID NO: 1221 - protein, 10 aa, synthetic construct
  REGION 1..10: note = Description of Artificial Sequence: Synthetic peptide
PIEVCMYREP

SEQ ID NO: 1222 - protein, 15 aa, synthetic construct
  REGION 1..15: note = Description of Artificial Sequence: Synthetic peptide
VTVLALGALAGVGVG

SEQ ID NO: 1223 - protein, 6 aa, synthetic construct
  REGION 1..6: note = Description of Artificial Sequence: Synthetic peptide
PFVYLI

SEQ ID NO: 1224 - protein, 12 aa, synthetic construct
  REGION 1..12: note = Description of Artificial Sequence: Synthetic peptide
PLIYLRLLRGQF

SEQ ID NO: 1225 - protein, 448 aa, synthetic construct
  REGION 1..448: note = Description of Artificial Sequence: Synthetic polypeptide
QVQLQQWGAGLLKPSETLSLTCAVYGGSFSGYYWSWIRQSPEKGLEWIGEINHGGYVTYNPSLESRVTISVDTSKNQFSLKLSSVTAADTAVYYCARDYGPGNYDWYFDLWGRGTLVTVSSASTKGPSVFPLAPCSRSTSESTAALGCLVKDYFPEPVTVSWNSGALTSGVHTFPAVLQSSGLYSLSSVVTVPSSSLGTKTYTCNVDHKPSNTKVDKRVESKYGPPCPPCPAPEFLGGPSVFLFPPKPKDTLMISRTPEVTCVVVDVSQEDPEVQFNWYVDGVEVHNAKTKPREEQFNSTYRVVSVLTVLHQDWLNGKEYKCKVSNKGLPSSIEKTISKAKGQPREPQVYTLPPSQEEMTKNQVSLTCLVKGFYPSDIAVEWESNGQPENNYKTTPPVLDSDGSFFLYSRLTVDKSRWQEGNVFSCSVMHEALHNHYTQKSLSLSLGK

SEQ ID NO: 1226 - protein, 216 aa, synthetic construct
  REGION 1..216: note = Description of Artificial Sequence: Synthetic polypeptide
EIVLTQSPATLSLSPGERATLSCRASQSVSSYLAWYQQKPGQAPRLLIYDASNRATGIPARFSGSGSGTDFTLTISSLEPEDFAVYYCQQRSNWPPALTFCGGTKVEIKRTVAAPSVFIFPPSDEQLKSGTASVVCLLNNFYPREAKVQWKVDNALQSGNSQESVTEQDSKDSTYSLSSTLTLSKADYEKHKVYACEVTHQGLSSPVTKSFNRGEC

SEQ ID NO: 1227 - protein, 204 aa, synthetic construct
  REGION 1..204: note = Description of Artificial Sequence: Synthetic polypeptide
CPWAVSGARASPGSAASPRLREGPELSPDDPAGLLDLRQGMFAQLVAQNVLLIDGPLSWYSDPGLAGVSLTGGLSYKEDTKELVVAKAGVYYVFFQLELRRVVAGEGSGSVSLALHLQPLRSAAGAAALALTVDLPPASSEARNSAFGFQGRLLHLSAGQRLGVHLHTEARARHAWQLTQGATVLGLFRVTPEIPAGLPSPRSE

SEQ ID NO: 1228 - protein, 442 aa, synthetic construct
  REGION 1..442: note = Description of Artificial Sequence: Synthetic polypeptide
EVQLVQSGAEVKKPGESLRISCKGSGYSFSTYWISWVRQMPGKGLEWMGKIYPGDSYTNYSPSFQGQVTISADKSISTAYLQWSSLKASDTAMYYCARGYGIFDYWGQGTLVTVSSASTKGPSVFPLAPCSRSTSESTAALGCLVKDYFPEPVTVSWNSGALTSGVHTFPAVLQSSGLYSLSSVVTVPSSNFGTQTYTCNVDHKPSNTKVDKTVERKCCVECPPCPAPPVAGPSVFLFPPKPKDTLMISRTPEVTCVVVDVSHEDPEVQFNWYVDGVEVHNAKTKPREEQFNSTFRVVSVLTVVHQDWLNGKEYKCKVSNKGLPAPIEKTISKTKGQPREPQVYTLPPSREEMTKNQVSLTCLVKGFYPSDIAVEWESNGQPENNYKTTPPMLDSDGSFFLYSKLTVDKSRWQQGNVFSCSVMHEALHNHYTQKSLSLSPGK

SEQ ID NO: 1229 - protein, 214 aa, synthetic construct
  REGION 1..214: note = Description of Artificial Sequence: Synthetic polypeptide
SYELTQPPSVSVSPGQTASITCSGDNIGDQYAHWYQQKPGQSPVLVIYQDKNRPSGIPERFSGSNSGNTATLTISGTQAMDEADYYCATYTGFGSLAVFGGGTKLTVLGQPKAAPSVTLFPPSSEELQANKATLVCLISDFYPGAVTVAWKADSSPVKAGVETTTPSKQSNNKYAASSYLSLTPEQWKSHRSYSCQVTHEGSTVEKTVAPTECS

SEQ ID NO: 1230 - protein, 322 aa, synthetic construct
  REGION 1..322: note = Description of Artificial Sequence: Synthetic polypeptide
  VARIANT 21..89: note = MOD_RES - This region may encompass one of the following sequences: GSMCMPCFTTDHQMARKCDDCCGGKGRGKCYGPQCLCR or GSMCMPCFTTDHQMARRCDDCCGGRGRGKCYGPQCLCR or GSMCMPCFTTDHQMARRCDDCCGGRGRGRCYGPQCLCR or GSMCMPCFTTDHQMARKCDDCCGGRGRGRCYGPQC or LCR or GSMCMPCFTTDHQMARRCDDCCGGKGRGRCYGPQCLCR or GSMCMPCFTTHHRMAENCDICCGGDGRGKCYGPQCLCR or GSMCMPCFTTDTQMQERCDRCCGGGGRGKCWGPQCLCI or GSMCMPCFTTDTQMQERCDRCCGGGGRGRCWGPQCLCI or GSMCMPCFTTEQRMAIICDDCCGGF or GRGKCYGPQCLCR or GSMCMPCFTTEQRMAIICDDCCGGFGRGRCYGPQCLCR or GSICIPCFTTDHQIARRCDDCCGGRGRGKCYGPQCICR or GSICIPCFTTDHQIARRCDDCCGGRGRGRCYGPQCICR or GSMCMPCFTTDHRMAENCDICCGGDGRGKCYGPQCLCR or GSMCMPCFTTDHR or MAENCDICCGGDGRGRCYGPQCLCR or GSMCMPCFTTEQRMAIICDDCCGGFGRGKCYGPQCLCI or GSMCMPCFTTEQRMAIICDDCCGGFGRGRCYGPQCLCI or GSICIPCFTTDHQIARRCDDCCGGRGRGKCYGPQCICI or GSICIPCFTTDHQIARRCDDCCGGRGRGRCYGPQCICI or G or SMCMPCFTTDHRMAENCDICCGGDGRGKCYGPQCLCI or GSMCMPCFTTDHRMAENCDICCGGDGRGRCYGPQCLCI or GSMCMPCFTTDTQMQEKCDRCCGGGGRGRCWGPQCLCI; note = CONT. FROM ABOVE: GSMCMPCFTTEQRMAIKCDDCCGGFGRGRCYGPQCLCR or GSICIPCFTTDHQIARKCDDCCGGRGRGRCYGP or QCICR or GSMCMPCFTTDHRMAEKCDICCGGDGRGRCYGPQCLCR or GSMCMPCFTTDTQMQERCDRCCGGKGRGRCWGPQCLCI or GSMCMPCFTTEQRMAIICDDCCGGKGRGRCYGPQCLCR or GSICIPCFTTDHQIARRCDDCCGGKGRGRCYGPQCICR or GSMCMPCFTTDHRMAENCDIC or CGGKGRGRCYGPQCLCR or GSMCMPCFTTHHRMAENCDICCGGDGRGRCYGPQCLCR or GSMCMPCFTTDTQMQERCDRCCGGGGRGRCWGPQCLC or GSMCMPCFTTEQRMAIICDDCCGGFGRGRCYGPQCLC or GSICIPCFTTDHQIARRCDDCCGGRGRGRCYGPQCIC or GSMCMPCFTTDH or RMAENCDICCGGDGRGRCYGPQCLC or GSMCMPCFTTDHQMARRCDDCCGGRGRGRCYGPQCLCI or GSACAPCFTTDHQAARRCDDCCGGRGRGKCYGPQCLCR or GSACAPCFTTDHQAARKCDDCCGGKGRGKCYGPQCLCR or GSMCMPCFTTHHRMAENCDICCGGDGRGKCYGPQCLCI or G or SMCMPCFTTHHRMAENCDICCGGDGRGKCYGPQCLC or GSMCMPCFTTDHQMARRCDDCCGGRGRGRCYGPQCLC or GSMCMPCFTTHHQMAENCDICCGGDGRGKCYGPQCLCR or GSMCMPCFTTHHRMARNCDICCGGDGRGKCYGPQCLCR or GSMCMPCFTTHHRMAERCDICCGGDGRGKCYGPQC or LCR or GSMCMPCFTTHHRMAENCDDCCGGDGRGKCYGPQCLCR or GSRCMPCFTTDHQMARRCDDCCGGRGRGKCYGPQCLCR; note = CONT. FROM ABOVE: GSICIPCFTTDHQIARRCDDCCGGRGRGKCYGPQCLCR or GSMCLPCFTTDHQLARRCDDCCGGRGRGKCYGPQCLCR or GSMCMPCFTTEHQMARRCEECCG or GRGRGKCYGPQCLCR or GSMCIPCFTTDHQMARRCEECCGGRGRGKCYGPQCLCR or GSICIPCFTTDHQMARRCDDCCGGRGDGKCYGPQCLCR or GSRCMPCFTTDHFMARFCDFCCGGRGRGKCYGPQCLCR or GSRCMPCFTTDHYMARYCDYCCGGRGRGKCYGPQCLCR or GSRCMPCFTTD or HRMARRCDRCCGGRGRGKCYGPQCLCR or GSRCMPCFTTDHEMARECDECCGGRGRGKCYGPQCLCR or GSRCMPCFTTDHHMARHCDHCCGGRGRGKCYGPQCLCR or GSLCLPCFTTHHRLADQCDICCGGDGRGKCYGPQCLCR or GSICIPCFTTEHQIARRCEECCGGRGRGKCYGPQCLCR or GSMCMPCFTTIYRMAHECDECCGGRGRGKCYGPQCLCR or GSMCMPCFTTGYRMAEYCDICCGGRGRGKCYGPQCLCR or GSMCMPCFTTHRRMANTCDACCGGRSRGKCYGPQCLCR or GSHCMPCFTTDHQMIRRCDDCCGGGSYGKCDGPQCLCF or GSDCMPCFTTDHRMADHCDICCGGDDRGKCY or GPQCLCR or GSMCMPCFTTDHEMERRCDDCCGIGGGGKCHGPQCLCG or GSMCMPCFTTSEQMFRRCDDCCGGWGDGKCNGPHCLCR or GSCGPCFTTDHQMEQKCAECCGGIGKCYGPQCLCNR or GSRCGPCFTTDPQTQAKCSECCGRKGGVCKGPQCICGIQY or GSMCMPCFTTDPNMAKKCR or DCCGGNGKCFGPQCLCNR or GSMCMPCFTTDHNMAKKCNDCCGGYGKCFGPQCLCR; note = CONT. FROM ABOVE: GSRCPPCFTTNPNMEADCRKCCGGRGYCASYQCICPGG or GSMCMPCFTTDPNMANKCRDCCGGGKKCFGPQCLCNR or GSMKFLYGVILIALFLTVMTATLSEARCGPCFTTDPQTQAKCSECCGRKGGVCKG or PQCICGIQY or GSMCMPCFTTRPDMAQQCRACCKGRGKCFGPQCLCGYD or GSMKFLYGIVFIALFLTVMTATLSDAMCMPCFTTDHNMAKKCRDCCGGNGKCFGPQCLC NRG or GSMCMPCFTTDHNMAKKCRDCCGGNGKCFGPQCLCNR or GSMKFLYGIVFITLFLTVMIATHTEAMCMPCFTTRPNM or AQQCRDCCRGRGKCFGPQCLCGYD or GSMKFLYGIVFIALFLTVMIATHTEAMCMPCFTTRPNMAQQCRDCCRGRGKCFGPQCLC GYD or GSRCKPCFTTDPQMSKKCADCCGGKGKGKCYGPQCLC or GSMKFLYGIVFITLFLTVMIATHTEAAMCMPCFTTNLNMEQECRDCCGGTGRCFGPQCL CGYD or GSRCSPCFTTDQQMTKKCYDCCGGKGKGKCYGPQCICAPY or GSCGPCFTTDPYTESKCATCCGGRGKCVGPQCLCNRI or GSTEAMCMPCFTTDHNMAKKCRDCCGGNGKCFGYQCLCNRG or GSMKFLYGIVFIALFLTVMFATQTDGCGPCFTTDANMARKCRECCGGIGKCFGPQCLCN RI or GSM or KFLYGIVFIALFLTVMFATQTDGCGPCFTTDANMARKCRECCGGNGKCFGPQCLCNRE or GSMKFLYGTILIAFFLTVMIATHSEARCPPCFTTNPNMEADCRKCCGGRGYCASYQCIC PGG or [sequence omitted] or GSMKFLYGIVFIALFLTVMIATLTEAMCM; note = CONT. FROM ABOVE: PCFTTRPDMAQQCRDCCGGNGKCFGYQCLCNRG or GSMKFLYGIVFIALFLTVMIATHTEAMCMPCFTTRPDMAQQCRDCCGGNGKCFGYQCLC NRG or GSMKFLYGIILIALFLTVMIATHSEARCPNCFTTNPNAEADCKKCCGNRWGKCAGYQCV CPMK or GSMKFLYGIVFIALFLTGMIATHTEAMCMPCF or TTRPDMAQQCRDCCGGNGKCFGYQCLCNRGRIVIMYT or GSMCMPCFTTRPGMAQQCRDCCGGNGKCFGYQCLCNR or GSMCIPCFTTNPNMAAKCNACCGSRRGSCRGPQCICR or GSMCIPCFTTNPNMAAKCNACCGSRRGSCRGPQCICN or GSMCIPCFTTNPNMAAKCNACCGGNGSCRGPQCICN or GSMCIPCFTTNPNMAAKCNACCGSRGRGSCRGPQCICN or GSMCIPCFTTNPNMAAKCNACCGSRGRGKCRGPQCICN or GSMCIPCFTTDHQMAAKCNACCGSRRGSCRGPQCICN or GSMCIPCFTTNHQMAAKCNACCGSRRGSCRGPQCICN or GSMCIPCFTTNPNMARKCNACCGSRGRG or SCRGPQCICN or GSMCIPCFTTNPNMAAKCNACCGGKGRGSCRGPQCICN or GSMCIPCFTTNPNMAAKCNACCGSRRGSCFGPQCICN or GSMCIPCFTTNPNMAAKCNACCGSRGRGKCFGPQCICN or GSMCIPCFTTNPNMAAKCNACCGSRGRGSCFGPQCICN or GSMCIPCFTTNPNMAAK or CNACCGSRGRGSCYGPQCICN or GSMCIPCFTTNPNMAAKCDACCGSRRGSCRGPQCICN or GSMCIPCFTTNHQMAAKCDACCGSRRGSCRGPQCICN or GSMCIPCFTTNHNMAAKCDACCGGRGRGSCRGPQCICN; note = CONT. FROM ABOVE: GSMCIPCFTTNPNMAAKCDACCGSRGRGSCRGPQCICN or GSMCIPC or FTTNPNMAAKCDACCGGKGRGSCRGPQCICN or GSMCIPCFTTNHNMAAKCDACCGSRGRGSCRGPQCICN or GSMCIPCFTTNPNMAAKCRDCCGGRGSCRGPQCICN or GSMCMPCFTTNPNMAAKCDDCCGSRGRGSCRGPQCICN or GSMCIPCFTTNPNMAARCNACCGSRRGSCRGPQCIC or GSMCIPCFTTNPNMAAKCNACCGSRRGSCRGPQCICI or GSMCMPCFTTDHQMARACDDCCGGKGRGKCYGPQCLCR or GSMCMPCFTTDHQMARRCDDCCGGKGRGKCYGPQCLCR or GSMCMPCFTTDHQMARKCDDCCGGAGRGKCYGPQCLCR or GSMCMPCFTTDHQMARACDDCCGGAGRGKCYG or PQCLCR or GSMCMPCFTTDHQMARRCDDCCGGAGRGKCYGPQCLCR or GSMCMPCFTTDHQMARKCDDCCGGRGRGKCYGPQCLCR or GSMCMPCFTTDHQMARACDDCCGGRGRGKCYGPQCLCR or GSMCMPCFTTDHQMARKCDDCCGGKGRGACYGPQCLCR or GSMCMPCFTTDHQMARACDD or CCGGKGRGACYGPQCLCR or GSMCMPCFTTDHQMARRCDDCCGGKGRGACYGPQCLCR or GSMCMPCFTTDHQMARKCDDCCGGAGRGACYGPQCLCR or GSMCMPCFTTDHQMARACDDCCGGAGRGACYGPQCLCR or GSMCMPCFTTDHQMARRCDDCCGGAGRGACYGPQCLCR or GSMCMPCF or TTDHQMARKCDDCCGGRGRGACYGPQCLCR or GSMCMPCFTTDHQMARACDDCCGGRGRGACYGPQCLCR or GSMCMPCFTTDHQMARRCDDCCGGRGRGACYGPQCLCR; note = CONT. FROM ABOVE: GSMCMPCFTTDHQMARKCDDCCGGKGRGRCYGPQCLCR or GSMCMPCFTTDHQMARACDDCCGGKGRGRCYGPQCLCR or GSMCMPCFTTDHQMARKCDDCCGGAGRGRCYGPQCLCR or GSMCMPCFTTDHQMARACDDCCGGAGRGRCYGPQCLCR or GSMCMPCFTTDHQMARRCDDCCGGAGRGRCYGPQCLCR or GSMCMPCFTTDHQMARACDDCCGGRGRGRCYGPQCLCR or GSKCMPCFTTDHQMARRCDDCCGGRGRG or RCYGPQCLCR or GSACAPCFTTDHQAARRCDDCCGGRGRGRCYGPQCLCR or GSKCAPCFTTDHQAARRCDDCCGGRGRGRCYGPQCLCR or GSMCMPCFTTDHQMARCDDCCGGGRGKCYGPQCLCR or GSMCMPCFTTDHQMARCDDCCGGGRGCYGPQCLCR or GSKCMPCFTTDHQMARCDDCC or GGGRGCYGPQCLCR or GSACAPCFTTDHQAARCDDCCGGGRGKCYGPQCLCR or GSACAPCFTTDHQAARCDDCCGGGRGCYGPQCLCR or GSKCAPCFTTDHQAARCDDCCGGGRGCYGPQCLCR or GSMCMPCFTTDHQMARKCDDCCGGKGRGKCYGPQCLCRGAGAAGG or GSMCMPCFTTDHQ or MARACDDCCGGKGRGKCYGPQCLCRGAGAAGG or GSMCMPCFTTDHQMARRCDDCCGGKGRGKCYGPQCLCRGAGAAGG or GSMCMPCFTTDHQMARKCDDCCGGAGRGKCYGPQCLCRGAGAAGG or GSMCMPCFTTDHQMARACDDCCGGAGRGKCYGPQCLCRGAGAAGG or GSMCMPCFTTDHQMARR or CDDCCGGAGRGKCYGPQCLCRGAGAAGG or GSMCMPCFTTDHQMARKCDDCCGGRGRGKCYGPQCLCRGAGAAGG; note = CONT. FROM ABOVE: GSMCMPCFTTDHQMARACDDCCGGRGRGKCYGPQCLCRGAGAAGG or GSMCMPCFTTDHQMARRCDDCCGGRGRGKCYGPQCLCRGAGAAGG or GSMCMPCFTTDHQMARKCDDC or CGGKGRGACYGPQCLCRGAGAAGG or GSMCMPCFTTDHQMARACDDCCGGKGRGACYGPQCLCRGAGAAGG or GSMCMPCFTTDHQMARRCDDCCGGKGRGACYGPQCLCRGAGAAGG or GSMCMPCFTTDHQMARKCDDCCGGAGRGACYGPQCLCRGAGAAGG or GSMCMPCFTTDHQMARACDDCCGGA or GRGACYGPQCLCRGAGAAGG or GSMCMPCFTTDHQMARRCDDCCGGAGRGACYGPQCLCRGAGAAGG or GSMCMPCFTTDHQMARKCDDCCGGRGRGACYGPQCLCRGAGAAGG or GSMCMPCFTTDHQMARACDDCCGGRGRGACYGPQCLCRGAGAAGG or GSMCMPCFTTDHQMARRCDDCCGGRGRGA or CYGPQCLCRGAGAAGG or GSMCMPCFTTDHQMARKCDDCCGGKGRGRCYGPQCLCRGAGAAGG or GSMCMPCFTTDHQMARACDDCCGGKGRGRCYGPQCLCRGAGAAGG or GSMCMPCFTTDHQMARRCDDCCGGKGRGRCYGPQCLCRGAGAAGG or GSMCMPCFTTDHQMARKCDDCCGGAGRGRCYGP or QCLCRGAGAAGG or GSMCMPCFTTDHQMARACDDCCGGAGRGRCYGPQCLCRGAGAAGG or GSMCMPCFTTDHQMARRCDDCCGGAGRGRCYGPQCLCRGAGAAGG or GSMCMPCFTTDHQMARKCDDCCGGRGRGRCYGPQCLCRGAGAAGG or GSMCMPCFTTDHQMARACDDCCGGRGRGRCYGPQCLC or RGAGAAGG; note = CONT. FROM ABOVE: GSMCMPCFTTDHQMARRCDDCCGGRGRGRCYGPQCLCRGAGAAGG or GSKCMPCFTTDHQMARRCDDCCGGRGRGRCYGPQCLCRGAGAAGG or GSACAPCFTTDHQAARRCDDCCGGRGRGRCYGPQCLCRGAGAAGG or GSKCAPCFTTDHQAARRCDDCCGGRGRGRCYGPQCLCRGAG or AAGG or GSMCMPCFTTDHQMARCDDCCGGGRGKCYGPQCLCRGAGAAGG or GSMCMPCFTTDHQMARCDDCCGGGRGCYGPQCLCRGAGAAGG or GSKCMPCFTTDHQMARCDDCCGGGRGCYGPQCLCRGAGAAGG or GSACAPCFTTDHQAARCDDCCGGGRGKCYGPQCLCRGAGAAGG or GSAC or APCFTTDHQAARCDDCCGGGRGCYGPQCLCRGAGAAGG or GSKCAPCFTTDHQAARCDDCCGGGRGCYGPQCLCRGAGAAGG or GSMCMPCFTTDHQMVRKCDDCCGGKGRGKCYGPQCLCR or GSMCMPCFTTDHQMVRVCDDCCGGKGRGKCYGPQCLCR or GSMCMPCFTTDHQMVRRCDDCCGGKGRG or KCYGPQCLCR or GSMCMPCFTTDHQMVRKCDDCCGGVGRGKCYGPQCLCR or GSMCMPCFTTDHQMVRVCDDCCGGVGRGKCYGPQCLCR or GSMCMPCFTTDHQMVRRCDDCCGGVGRGKCYGPQCLCR or GSMCMPCFTTDHQMVRKCDDCCGGRGRGKCYGPQCLCR or GSMCMPCFTTDHQMVR or VCDDCCGGRGRGKCYGPQCLCR or GSMCMPCFTTDHQMVRRCDDCCGGRGRGKCYGPQCLCR or GSMCMPCFTTDHQMVRKCDDCCGGKGRGVCYGPQCLCR or GSMCMPCFTTDHQMVRVCDDCCGGKGRGVCYGPQCLCR; note = CONT. FROM ABOVE: GSMCMPCFTTDHQMVRRCDDCCGGKGRGVCYGPQCLCR or GSMC or MPCFTTDHQMVRKCDDCCGGVGRGVCYGPQCLCR or GSMCMPCFTTDHQMVRVCDDCCGGVGRGVCYGPQCLCR or GSMCMPCFTTDHQMVRRCDDCCGGVGRGVCYGPQCLCR or GSMCMPCFTTDHQMVRKCDDCCGGRGRGVCYGPQCLCR or GSMCMPCFTTDHQMVRVCDDCCGGRGRGVCYGPQCL or CR or GSMCMPCFTTDHQMVRRCDDCCGGRGRGVCYGPQCLCR or GSMCMPCFTTDHQMVRKCDDCCGGKGRGRCYGPQCLCR or GSMCMPCFTTDHQMVRVCDDCCGGKGRGRCYGPQCLCR or GSMCMPCFTTDHQMVRRCDDCCGGKGRGRCYGPQCLCR or GSMCMPCFTTDHQMVRKCDDCCGG or VGRGRCYGPQCLCR or GSMCMPCFTTDHQMVRVCDDCCGGVGRGRCYGPQCLCR or GSMCMPCFTTDHQMVRRCDDCCGGVGRGRCYGPQCLCR or GSMCMPCFTTDHQMVRKCDDCCGGRGRGRCYGPQCLCR or GSMCMPCFTTDHQMVRVCDDCCGGRGRGRCYGPQCLCR or GSMCMPCFTTDH or QMVRRCDDCCGGRGRGRCYGPQCLCR or GSKCMPCFTTDHQMVRRCDDCCGGRGRGRCYGPQCLCR or GSVCVPCFTTDHQVVRRCDDCCGGRGRGRCYGPQCLCR or GSKCVPCFTTDHQVVRRCDDCCGGRGRGRCYGPQCLCR or GSMCMPCFTTDHQMVRCDDCCGGGRGKCYGPQCLCR or GS or MCMPCFTTDHQMVRCDDCCGGGRGCYGPQCLCR or GSKCMPCFTTDHQMVRCDDCCGGGRGCYGPQCLCR or GSVCVPCFTTDHQVVRCDDCCGGGRGKCYGPQCLCR; note = CONT. FROM ABOVE: GSVCVPCFTTDHQVVRCDDCCGGGRGCYGPQCLCR or GSKCVPCFTTDHQVVRCDDCCGGGRGCYGPQCLCR or GSMC or MPCFTTDHQMVRKCDDCCGGKGRGKCYGPQCLCRGAGAAGG or GSMCMPCFTTDHQMVRVCDDCCGGKGRGKCYGPQCLCRGAGAAGG or GSMCMPCFTTDHQMVRRCDDCCGGKGRGKCYGPQCLCRGAGAAGG or GSMCMPCFTTDHQMVRKCDDCCGGVGRGKCYGPQCLCRGAGAAGG or GSMCMPCF or TTDHQMVRVCDDCCGGVGRGKCYGPQCLCRGAGAAGG or GSMCMPCFTTDHQMVRRCDDCCGGVGRGKCYGPQCLCRGAGAAGG or GSMCMPCFTTDHQMVRKCDDCCGGRGRGKCYGPQCLCRGAGAAGG or GSMCMPCFTTDHQMVRVCDDCCGGRGRGKCYGPQCLCRGAGAAGG or GSMCMPCFTTDH or QMVRRCDDCCGGRGRGKCYGPQCLCRGAGAAGG or GSMCMPCFTTDHQMVRKCDDCCGGKGRGVCYGPQCLCRGAGAAGG or GSMCMPCFTTDHQMVRVCDDCCGGKGRGVCYGPQCLCRGAGAAGG or GSMCMPCFTTDHQMVRRCDDCCGGKGRGVCYGPQCLCRGAGAAGG or GSMCMPCFTTDHQMVR or KCDDCCGGVGRGVCYGPQCLCRGAGAAGG or GSMCMPCFTTDHQMVRVCDDCCGGVGRGVCYGPQCLCRGAGAAGG or GSMCMPCFTTDHQMVRRCDDCCGGVGRGVCYGPQCLCRGAGAAGG or GSMCMPCFTTDHQMVRKCDDCCGGRGRGVCYGPQCLCRGAGAAGG or GSMCMPCFTTDHQMVRVCDD or CCGGRGRGVCYGPQCLCRGAGAAGG or GSMCMPCFTTDHQMVRRCDDCCGGRGRGVCYGPQCLCRGAGAAGG; note = CONT. FROM ABOVE: GSMCMPCFTTDHQMVRKCDDCCGGKGRGRCYGPQCLCRGAGAAGG or GSMCMPCFTTDHQMVRVCDDCCGGKGRGRCYGPQCLCRGAGAAGG or GSMCMPCFTTDHQMVRRCDDCCGG or KGRGRCYGPQCLCRGAGAAGG or GSMCMPCFTTDHQMVRKCDDCCGGVGRGRCYGPQCLCRGAGAAGG or GSMCMPCFTTDHQMVRVCDDCCGGVGRGRCYGPQCLCRGAGAAGG or GSMCMPCFTTDHQMVRRCDDCCGGVGRGRCYGPQCLCRGAGAAGG or GSMCMPCFTTDHQMVRKCDDCCGGRGRG or RCYGPQCLCRGAGAAGG or GSMCMPCFTTDHQMVRVCDDCCGGRGRGRCYGPQCLCRGAGAAGG or GSMCMPCFTTDHQMVRRCDDCCGGRGRGRCYGPQCLCRGAGAAGG or GSKCMPCFTTDHQMVRRCDDCCGGRGRGRCYGPQCLCRGAGAAGG or GSVCVPCFTTDHQVVRRCDDCCGGRGRGRCYG or PQCLCRGAGAAGG or GSKCVPCFTTDHQVVRRCDDCCGGRGRGRCYGPQCLCRGAGAAGG or GSMCMPCFTTDHQMVRCDDCCGGGRGKCYGPQCLCRGAGAAGG or GSMCMPCFTTDHQMVRCDDCCGGGRGCYGPQCLCRGAGAAGG or GSKCMPCFTTDHQMVRCDDCCGGGRGCYGPQCLCRGAGAAG or G or GSVCVPCFTTDHQVVRCDDCCGGGRGKCYGPQCLCRGAGAAGG or GSVCVPCFTTDHQVVRCDDCCGGGRGCYGPQCLCRGAGAAGG or GSKCVPCFTTDHQVVRCDDCCGGGRGCYGPQCLCRGAGAAGG or GSMCMPCFTTDHQMLRKCDDCCGGKGRGKCYGPQCLCR or GSMCMPCFTTDH or QMLRLCDDCCGGKGRGKCYGPQCLCR; note = CONT. FROM ABOVE: GSMCMPCFTTDHQMLRRCDDCCGGKGRGKCYGPQCLCR or GSMCMPCFTTDHQMLRKCDDCCGGLGRGKCYGPQCLCR or GSMCMPCFTTDHQMLRLCDDCCGGLGRGKCYGPQCLCR or GSMCMPCFTTDHQMLRRCDDCCGGLGRGKCYGPQCLCR or GSMCMPCFTTDHQMLRKCDDCCGGRGRGKCYGPQCLCR or GSMCMPCFTTDHQMLRLCDDCCGGRGRGKCYGPQCLCR or GSMCMPCFTTDHQMLRRCDDCCGGRGRGKCYGPQCLCR or GSMCMPCFTTDHQMLRKCDDCCGGKGRGLCYGPQCLCR or GSMCMPCFTTDHQMLRLCDDCCGGKGRGLCYG or PQCLCR or GSMCMPCFTTDHQMLRRCDDCCGGKGRGLCYGPQCLCR or GSMCMPCFTTDHQMLRKCDDCCGGLGRGLCYGPQCLCR or GSMCMPCFTTDHQMLRLCDDCCGGLGRGLCYGPQCLCR or GSMCMPCFTTDHQMLRRCDDCCGGLGRGLCYGPQCLCR or GSMCMPCFTTDHQMLRKCDD or CCGGRGRGLCYGPQCLCR or GSMCMPCFTTDHQMLRLCDDCCGGRGRGLCYGPQCLCR or GSMCMPCFTTDHQMLRRCDDCCGGRGRGLCYGPQCLCR or GSMCMPCFTTDHQMLRKCDDCCGGKGRGRCYGPQCLCR or GSMCMPCFTTDHQMLRLCDDCCGGKGRGRCYGPQCLCR or GSMCMPCF or TTDHQMLRRCDDCCGGKGRGRCYGPQCLCR or GSMCMPCFTTDHQMLRKCDDCCGGLGRGRCYGPQCLCR or GSMCMPCFTTDHQMLRLCDDCCGGLGRGRCYGPQCLCR or GSMCMPCFTTDHQMLRRCDDCCGGLGRGRCYGPQCLCR or GSMCMPCFTTDHQMLRKCDDCCGGRGRGRCYGPQCLCR; note = CONT. FROM ABOVE: GSMCMPCFTTDHQMLRLCDDCCGGRGRGRCYGPQCLCR or GSMCMPCFTTDHQMLRRCDDCCGGRGRGRCYGPQCLCR or GSKCMPCFTTDHQMLRRCDDCCGGRGRGRCYGPQCLCR or GSLCLPCFTTDHQLLRRCDDCCGGRGRGRCYGPQCLCR or GSKCLPCFTTDHQLLRRCDDCCGGRGRG or RCYGPQCLCR or GSMCMPCFTTDHQMLRCDDCCGGGRGKCYGPQCLCR or GSMCMPCFTTDHQMLRCDDCCGGGRGCYGPQCLCR or GSKCMPCFTTDHQMLRCDDCCGGGRGCYGPQCLCR or GSLCLPCFTTDHQLLRCDDCCGGGRGKCYGPQCLCR or GSLCLPCFTTDHQLLRCDDCCGGGRG or CYGPQCLCR or GSKCLPCFTTDHQLLRCDDCCGGGRGCYGPQCLCR or GSMCMPCFTTDHQMLRKCDDCCGGKGRGKCYGPQCLCRGAGAAGG or GSMCMPCFTTDHQMLRLCDDCCGGKGRGKCYGPQCLCRGAGAAGG or GSMCMPCFTTDHQMLRRCDDCCGGKGRGKCYGPQCLCRGAGAAGG or GSMCMPCFTTDHQMLRKCDDCCGGLGRGKCYGPQCLCRGAGAAGG or GSMCMPCFTTDHQMLRLCDDCCGGLGRGKCYGPQCLCRGAGAAGG or GSMCMPCFTTDHQMLRRCDDCCGGLGRGKCYGPQCLCRGAGAAGG or GSMCMPCFTTDHQMLRKCDDCCGGRGRGKCYGPQCLCRGAGAAGG or GSM or CMPCFTTDHQMLRLCDDCCGGRGRGKCYGPQCLCRGAGAAGG or GSMCMPCFTTDHQMLRRCDDCCGGRGRGKCYGPQCLCRGAGAAGG or GSMCMPCFTTDHQMLRKCDDCCGGKGRGLCYGPQCLCRGAGAAGG; note = CONT. FROM ABOVE: GSMCMPCFTTDHQMLRLCDDCCGGKGRGLCYGPQCLCRGAGAAGG or GSMCMPC or FTTDHQMLRRCDDCCGGKGRGLCYGPQCLCRGAGAAGG or GSMCMPCFTTDHQMLRKCDDCCGGLGRGLCYGPQCLCRGAGAAGG or GSMCMPCFTTDHQMLRLCDDCCGGLGRGLCYGPQCLCRGAGAAGG or GSMCMPCFTTDHQMLRRCDDCCGGLGRGLCYGPQCLCRGAGAAGG or GSMCMPCFTTD or HQMLRKCDDCCGGRGRGLCYGPQCLCRGAGAAGG or GSMCMPCFTTDHQMLRLCDDCCGGRGRGLCYGPQCLCRGAGAAGG or GSMCMPCFTTDHQMLRRCDDCCGGRGRGLCYGPQCLCRGAGAAGG or GSMCMPCFTTDHQMLRKCDDCCGGKGRGRCYGPQCLCRGAGAAGG or GSMCMPCFTTDHQML or RLCDDCCGGKGRGRCYGPQCLCRGAGAAGG or GSMCMPCFTTDHQMLRRCDDCCGGKGRGRCYGPQCLCRGAGAAGG or GSMCMPCFTTDHQMLRKCDDCCGGLGRGRCYGPQCLCRGAGAAGG or GSMCMPCFTTDHQMLRLCDDCCGGLGRGRCYGPQCLCRGAGAAGG or GSMCMPCFTTDHQMLRRCD or DCCGGLGRGRCYGPQCLCRGAGAAGG or GSMCMPCFTTDHQMLRKCDDCCGGRGRGRCYGPQCLCRGAGAAGG or GSMCMPCFTTDHQMLRLCDDCCGGRGRGRCYGPQCLCRGAGAAGG or GSMCMPCFTTDHQMLRRCDDCCGGRGRGRCYGPQCLCRGAGAAGG or GSKCMPCFTTDHQMLRRCDDCCG or GRGRGRCYGPQCLCRGAGAAGG or GSLCLPCFTTDHQLLRRCDDCCGGRGRGRCYGPQCLCRGAGAAGG; note = CONT. FROM ABOVE: GSKCLPCFTTDHQLLRRCDDCCGGRGRGRCYGPQCLCRGAGAAGG or GSMCMPCFTTDHQMLRCDDCCGGGRGKCYGPQCLCRGAGAAGG or GSMCMPCFTTDHQMLRCDDCCGGGRGCYG or PQCLCRGAGAAGG or GSKCMPCFTTDHQMLRCDDCCGGGRGCYGPQCLCRGAGAAGG or GSLCLPCFTTDHQLLRCDDCCGGGRGKCYGPQCLCRGAGAAGG or GSLCLPCFTTDHQLLRCDDCCGGGRGCYGPQCLCRGAGAAGG or GSKCLPCFTTDHQLLRCDDCCGGGRGCYGPQCLCRGAGAAGG or GSGCGPCFTTDHQGARKCDDCCGGKGRGKCYGPQCLCR or GSGCGPCFTTDHQGARACDDCCGGKGRGKCYGPQCLCR or GSGCGPCFTTDHQGARRCDDCCGGKGRGKCYGPQCLCR or GSGCGPCFTTDHQGARKCDDCCGGAGRGKCYGPQCLCR or GSGCGPCFTTDHQGARACDDCCGGAGRG or KCYGPQCLCR or GSGCGPCFTTDHQGARRCDDCCGGAGRGKCYGPQCLCR or GSGCGPCFTTDHQGARKCDDCCGGRGRGKCYGPQCLCR or GSGCGPCFTTDHQGARACDDCCGGRGRGKCYGPQCLCR or GSGCGPCFTTDHQGARRCDDCCGGRGRGKCYGPQCLCR or GSGCGPCFTTDHQGAR or KCDDCCGGKGRGACYGPQCLCR or GSGCGPCFTTDHQGARACDDCCGGKGRGACYGPQCLCR or GSGCGPCFTTDHQGARRCDDCCGGKGRGACYGPQCLCR or GSGCGPCFTTDHQGARKCDDCCGGAGRGACYGPQCLCR or GSGCGPCFTTDHQGARACDDCCGGAGRGACYGPQCLCR or GSGC or GPCFTTDHQGARRCDDCCGGAGRGACYGPQCLCR; note = CONT. FROM ABOVE: GSGCGPCFTTDHQGARKCDDCCGGRGRGACYGPQCLCR or GSGCGPCFTTDHQGARACDDCCGGRGRGACYGPQCLCR or GSGCGPCFTTDHQGARRCDDCCGGRGRGACYGPQCLCR or GSGCGPCFTTDHQGARKCDDCCGGKGRGRCYGPQCL or CR or GSGCGPCFTTDHQGARACDDCCGGKGRGRCYGPQCLCR or GSGCGPCFTTDHQGARRCDDCCGGKGRGRCYGPQCLCR or GSGCGPCFTTDHQGARKCDDCCGGAGRGRCYGPQCLCR or GSGCGPCFTTDHQGARACDDCCGGAGRGRCYGPQCLCR or GSGCGPCFTTDHQGARRCDDCCGG or AGRGRCYGPQCLCR or GSGCGPCFTTDHQGARKCDDCCGGRGRGRCYGPQCLCR or GSGCGPCFTTDHQGARACDDCCGGRGRGRCYGPQCLCR or GSGCGPCFTTDHQGARRCDDCCGGRGRGRCYGPQCLCR or GSKCGPCFTTDHQGARRCDDCCGGRGRGRCYGPQCLCR or GSGCGPCFTTDH or QGARCDDCCGGGRGKCYGPQCLCR or GSGCGPCFTTDHQGARCDDCCGGGRGCYGPQCLCR or GSKCGPCFTTDHQGARCDDCCGGGRGCYGPQCLCR or GSACAPCFTTDHQAARACDDCCGGKGRGKCYGPQCLCR or GSACAPCFTTDHQAARRCDDCCGGKGRGKCYGPQCLCR or GSACAPCF or TTDHQAARKCDDCCGGAGRGKCYGPQCLCR or GSACAPCFTTDHQAARACDDCCGGAGRGKCYGPQCLCR or GSACAPCFTTDHQAARRCDDCCGGAGRGKCYGPQCLCR or GSACAPCFTTDHQAARKCDDCCGGRGRGKCYGPQCLCR or GSACAPCFTTDHQAARACDDCCGGRGRGKCYGPQCLCR; note = CONT. FROM ABOVE: GSACAPCFTTDHQAARKCDDCCGGKGRGACYGPQCLCR or GSACAPCFTTDHQAARACDDCCGGKGRGACYGPQCLCR or GSACAPCFTTDHQAARRCDDCCGGKGRGACYGPQCLCR or GSACAPCFTTDHQAARKCDDCCGGAGRGACYGPQCLCR or GSACAPCFTTDHQAARACDDCCGGAGRG or ACYGPQCLCR or GSACAPCFTTDHQAARRCDDCCGGAGRGACYGPQCLCR or GSACAPCFTTDHQAARKCDDCCGGRGRGACYGPQCLCR or GSACAPCFTTDHQAARACDDCCGGRGRGACYGPQCLCR or GSACAPCFTTDHQAARRCDDCCGGRGRGACYGPQCLCR or GSACAPCFTTDHQAAR or KCDDCCGGKGRGRCYGPQCLCR or GSACAPCFTTDHQAARACDDCCGGKGRGRCYGPQCLCR or GSACAPCFTTDHQAARRCDDCCGGKGRGRCYGPQCLCR or GSACAPCFTTDHQAARKCDDCCGGAGRGRCYGPQCLCR or GSACAPCFTTDHQAARACDDCCGGAGRGRCYGPQCLCR or GSAC or APCFTTDHQAARRCDDCCGGAGRGRCYGPQCLCR or GSACAPCFTTDHQAARKCDDCCGGRGRGRCYGPQCLCR or GSACAPCFTTDHQAARACDDCCGGRGRGRCYGPQCLCR or GSICIPCFTTDHQIARKCDDCCGGKGRGKCYGPQCLCR or GSICIPCFTTDHQIARACDDCCGGKGRGKCYGPQCL or CR or GSICIPCFTTDHQIARRCDDCCGGKGRGKCYGPQCLCR or GSICIPCFTTDHQIARKCDDCCGGAGRGKCYGPQCLCR or GSICIPCFTTDHQIARACDDCCGGAGRGKCYGPQCLCR or GSICIPCFTTDHQIARRCDDCCGGAGRGKCYGPQCLCR; note = CONT. FROM ABOVE: GSICIPCFTTDHQIARKCDDCCGG or RGRGKCYGPQCLCR or GSICIPCFTTDHQIARACDDCCGGRGRGKCYGPQCLCR or GSICIPCFTTDHQIARKCDDCCGGKGRGACYGPQCLCR or GSICIPCFTTDHQIARACDDCCGGKGRGACYGPQCLCR or GSICIPCFTTDHQIARRCDDCCGGKGRGACYGPQCLCR or GSICIPCFTTDH or QIARKCDDCCGGAGRGACYGPQCLCR or GSICIPCFTTDHQIARACDDCCGGAGRGACYGPQCLCR or GSICIPCFTTDHQIARRCDDCCGGAGRGACYGPQCLCR or GSICIPCFTTDHQIARKCDDCCGGRGRGACYGPQCLCR or GSICIPCFTTDHQIARACDDCCGGRGRGACYGPQCLCR or GSICIPCFTTDHQIARRCDDCCGGRGRGACYGPQCLCR or GSICIPCFTTDHQIARKCDDCCGGKGRGRCYGPQCLCR or GSICIPCFTTDHQIARACDDCCGGKGRGRCYGPQCLCR or GSICIPCFTTDHQIARRCDDCCGGKGRGRCYGPQCLCR or GSICIPCFTTDHQIARKCDDCCGGAGRGRCYG or PQCLCR or GSICIPCFTTDHQIARACDDCCGGAGRGRCYGPQCLCR or GSICIPCFTTDHQIARRCDDCCGGAGRGRCYGPQCLCR or GSICIPCFTTDHQIARKCDDCCGGRGRGRCYGPQCLCR or GSICIPCFTTDHQIARACDDCCGGRGRGRCYGPQCLCR or GSICIPCFTTDHQIARRCDD or CCGGRGRGRCYGPQCLCR or GSKCIPCFTTDHQIARRCDDCCGGRGRGRCYGPQCLCR or GSICIPCFTTDHQIARCDDCCGGGRGKCYGPQCLCR or GSICIPCFTTDHQIARCDDCCGGGRGCYGPQCLCR; note = CONT. FROM ABOVE: GSKCIPCFTTDHQIARCDDCCGGGRGCYGPQCLCR or GSTCTPCFTTDHQTAR or KCDDCCGGKGRGKCYGPQCLCR or GSTCTPCFTTDHQTARACDDCCGGKGRGKCYGPQCLCR or GSTCTPCFTTDHQTARRCDDCCGGKGRGKCYGPQCLCR or GSTCTPCFTTDHQTARKCDDCCGGAGRGKCYGPQCLCR or GSTCTPCFTTDHQTARACDDCCGGAGRGKCYGPQCLCR or GSTC or TPCFTTDHQTARRCDDCCGGAGRGKCYGPQCLCR or GSTCTPCFTTDHQTARKCDDCCGGRGRGKCYGPQCLCR or GSTCTPCFTTDHQTARACDDCCGGRGRGKCYGPQCLCR or GSTCTPCFTTDHQTARRCDDCCGGRGRGKCYGPQCLCR or GSTCTPCFTTDHQTARKCDDCCGGKGRGACYGPQCL or CR or GSTCTPCFTTDHQTARACDDCCGGKGRGACYGPQCLCR or GSTCTPCFTTDHQTARRCDDCCGGKGRGACYGPQCLCR or GSTCTPCFTTDHQTARKCDDCCGGAGRGACYGPQCLCR or GSTCTPCFTTDHQTARACDDCCGGAGRGACYGPQCLCR or GSTCTPCFTTDHQTARRCDDCCGG or AGRGACYGPQCLCR or GSTCTPCFTTDHQTARKCDDCCGGRGRGACYGPQCLCR or GSTCTPCFTTDHQTARACDDCCGGRGRGACYGPQCLCR or GSTCTPCFTTDHQTARRCDDCCGGRGRGACYGPQCLCR or GSTCTPCFTTDHQTARKCDDCCGGKGRGRCYGPQCLCR or GSTCTPCFTTDH or QTARACDDCCGGKGRGRCYGPQCLCR or GSTCTPCFTTDHQTARRCDDCCGGKGRGRCYGPQCLCR or GSTCTPCFTTDHQTARKCDDCCGGAGRGRCYGPQCLCR; note = CONT. FROM ABOVE: GSTCTPCFTTDHQTARACDDCCGGAGRGRCYGPQCLCR or GSTCTPCFTTDHQTARRCDDCCGGAGRGRCYGPQCLCR or GSTCTPCFTTDHQTARKCDDCCGGRGRGRCYGPQCLCR or GSTCTPCFTTDHQTARACDDCCGGRGRGRCYGPQCLCR or GSTCTPCFTTDHQTARRCDDCCGGRGRGRCYGPQCLCR or GSKCTPCFTTDHQTARRCDDCCGGRGRGRCYGPQCLCR or GSTCTPCFTTDHQTARCDDCCGGGRGKCYGPQ or CLCR or GSTCTPCFTTDHQTARCDDCCGGGRGCYGPQCLCR or GSKCTPCFTTDHQTARCDDCCGGGRGCYGPQCLCR or GSVCVPCFTTDHQVARKCDDCCGGKGRGKCYGPQCLCR or GSVCVPCFTTDHQVARACDDCCGGKGRGKCYGPQCLCR or GSVCVPCFTTDHQVARRCDDCCGGKGRG or KCYGPQCLCR or GSVCVPCFTTDHQVARKCDDCCGGAGRGKCYGPQCLCR or GSVCVPCFTTDHQVARACDDCCGGAGRGKCYGPQCLCR or GSVCVPCFTTDHQVARRCDDCCGGAGRGKCYGPQCLCR or GSVCVPCFTTDHQVARKCDDCCGGRGRGKCYGPQCLCR or GSVCVPCFTTDHQVAR or ACDDCCGGRGRGKCYGPQCLCR or GSVCVPCFTTDHQVARRCDDCCGGRGRGKCYGPQCLCR or GSVCVPCFTTDHQVARKCDDCCGGKGRGACYGPQCLCR or GSVCVPCFTTDHQVARACDDCCGGKGRGACYGPQCLCR or GSVCVPCFTTDHQVARRCDDCCGGKGRGACYGPQCLCR or GSVC or VPCFTTDHQVARKCDDCCGGAGRGACYGPQCLCR or GSVCVPCFTTDHQVARACDDCCGGAGRGACYGPQCLCR; note = CONT. FROM ABOVE: GSVCVPCFTTDHQVARRCDDCCGGAGRGACYGPQCLCR or GSVCVPCFTTDHQVARKCDDCCGGRGRGACYGPQCLCR or GSVCVPCFTTDHQVARACDDCCGGRGRGACYGPQCL or CR or GSVCVPCFTTDHQVARRCDDCCGGRGRGACYGPQCLCR or GSVCVPCFTTDHQVARKCDDCCGGKGRGRCYGPQCLCR or GSVCVPCFTTDHQVARACDDCCGGKGRGRCYGPQCLCR or GSVCVPCFTTDHQVARRCDDCCGGKGRGRCYGPQCLCR or GSVCVPCFTTDHQVARKCDDCCGG or AGRGRCYGPQCLCR or GSVCVPCFTTDHQVARACDDCCGGAGRGRCYGPQCLCR or GSVCVPCFTTDHQVARRCDDCCGGAGRGRCYGPQCLCR or GSVCVPCFTTDHQVARKCDDCCGGRGRGRCYGPQCLCR or GSVCVPCFTTDHQVARACDDCCGGRGRGRCYGPQCLCR or GSVCVPCFTTDH or QVARRCDDCCGGRGRGRCYGPQCLCR or GSKCVPCFTTDHQVARRCDDCCGGRGRGRCYGPQCLCR or GSVCVPCFTTDHQVARCDDCCGGGRGKCYGPQCLCR or GSVCVPCFTTDHQVARCDDCCGGGRGCYGPQCLCR or GSKCVPCFTTDHQVARCDDCCGGGRGCYGPQCLCR or GSLCLPCF or TTDHQLARKCDDCCGGKGRGKCYGPQCLCR or GSLCLPCFTTDHQLARACDDCCGGKGRGKCYGPQCLCR or GSLCLPCFTTDHQLARRCDDCCGGKGRGKCYGPQCLCR or GSLCLPCFTTDHQLARKCDDCCGGAGRGKCYGPQCLCR or GSLCLPCFTTDHQLARACDDCCGGAGRGKCYGPQCLCR or GSLCLPCFTTDHQLARRCDDCCGGAGRGKCYGPQCLCR; note = CONT. FROM ABOVE: GSLCLPCFTTDHQLARKCDDCCGGRGRGKCYGPQCLCR or GSLCLPCFTTDHQLARACDDCCGGRGRGKCYGPQCLCR or GSLCLPCFTTDHQLARRCDDCCGGRGRGKCYGPQCLCR or GSLCLPCFTTDHQLARKCDDCCGGKGRG or ACYGPQCLCR or GSLCLPCFTTDHQLARACDDCCGGKGRGACYGPQCLCR or GSLCLPCFTTDHQLARRCDDCCGGKGRGACYGPQCLCR or GSLCLPCFTTDHQLARKCDDCCGGAGRGACYGPQCLCR or GSLCLPCFTTDHQLARACDDCCGGAGRGACYGPQCLCR or GSLCLPCFTTDHQLAR or RCDDCCGGAGRGACYGPQCLCR or GSLCLPCFTTDHQLARKCDDCCGGRGRGACYGPQCLCR or GSLCLPCFTTDHQLARACDDCCGGRGRGACYGPQCLCR or GSLCLPCFTTDHQLARRCDDCCGGRGRGACYGPQCLCR or GSLCLPCFTTDHQLARKCDDCCGGKGRGRCYGPQCLCR or GSLC or LPCFTTDHQLARACDDCCGGKGRGRCYGPQCLCR or GSLCLPCFTTDHQLARRCDDCCGGKGRGRCYGPQCLCR or GSLCLPCFTTDHQLARKCDDCCGGAGRGRCYGPQCLCR or GSLCLPCFTTDHQLARACDDCCGGAGRGRCYGPQCLCR or GSLCLPCFTTDHQLARRCDDCCGGAGRGRCYGPQCL or CR or GSLCLPCFTTDHQLARKCDDCCGGRGRGRCYGPQCLCR or GSLCLPCFTTDHQLARACDDCCGGRGRGRCYGPQCLCR or GSLCLPCFTTDHQLARRCDDCCGGRGRGRCYGPQCLCR or GSKCLPCFTTDHQLARRCDDCCGGRGRGRCYGPQCLCR or GSLCLPCFTTDHQLARCDDCCGGG or RGKCYGPQCLCR; note = CONT. FROM ABOVE: GSLCLPCFTTDHQLARCDDCCGGGRGCYGPQCLCR or GSKCLPCFTTDHQLARCDDCCGGGRGCYGPQCLCR or GSSCSPCFTTDHQSARKCDDCCGGKGRGKCYGPQCLCR or GSSCSPCFTTDHQSARACDDCCGGKGRGKCYGPQCLCR or GSSCSPCFTTDHQSARRCDD or CCGGKGRGKCYGPQCLCR or GSSCSPCFTTDHQSARKCDDCCGGAGRGKCYGPQCLCR or GSSCSPCFTTDHQSARACDDCCGGAGRGKCYGPQCLCR or GSSCSPCFTTDHQSARRCDDCCGGAGRGKCYGPQCLCR or GSSCSPCFTTDHQSARKCDDCCGGRGRGKCYGPQCLCR or GSSCSPCF or TTDHQSARACDDCCGGRGRGKCYGPQCLCR or GSSCSPCFTTDHQSARRCDDCCGGRGRGKCYGPQCLCR or GSSCSPCFTTDHQSARKCDDCCGGKGRGACYGPQCLCR or GSSCSPCFTTDHQSARACDDCCGGKGRGACYGPQCLCR or GSSCSPCFTTDHQSARRCDDCCGGKGRGACYGPQCLCR or GSSCSPCFTTDHQSARKCDDCCGGAGRGACYGPQCLCR or GSSCSPCFTTDHQSARACDDCCGGAGRGACYGPQCLCR or GSSCSPCFTTDHQSARRCDDCCGGAGRGACYGPQCLCR or GSSCSPCFTTDHQSARKCDDCCGGRGRGACYGPQCLCR or GSSCSPCFTTDHQSARACDDCCGGRGRG or ACYGPQCLCR or GSSCSPCFTTDHQSARRCDDCCGGRGRGACYGPQCLCR or GSSCSPCFTTDHQSARKCDDCCGGKGRGRCYGPQCLCR or GSSCSPCFTTDHQSARACDDCCGGKGRGRCYGPQCLCR or GSSCSPCFTTDHQSARRCDDCCGGKGRGRCYGPQCLCR; note = CONT. FROM ABOVE: GSSCSPCFTTDHQSAR or KCDDCCGGAGRGRCYGPQCLCR or GSSCSPCFTTDHQSARACDDCCGGAGRGRCYGPQCLCR or GSSCSPCFTTDHQSARRCDDCCGGAGRGRCYGPQCLCR or GSSCSPCFTTDHQSARKCDDCCGGRGRGRCYGPQCLCR or GSSCSPCFTTDHQSARACDDCCGGRGRGRCYGPQCLCR or GSSC or SPCFTTDHQSARRCDDCCGGRGRGRCYGPQCLCR or GSKCSPCFTTDHQSARRCDDCCGGRGRGRCYGPQCLCR or GSSCSPCFTTDHQSARCDDCCGGGRGKCYGPQCLCR or GSSCSPCFTTDHQSARCDDCCGGGRGCYGPQCLCR or GSKCSPCFTTDHQSARCDDCCGGGRGCYGPQCLCR or GSMCMPCFTTDPNMARKCRDCCGGNGKCFGPQCLCNRG or GSMCMPCFTTDHNMAKKCRDCCGGNGKCFGYQCLCNRG or GSMCMPCFTTDHQTARRCRDCCGGRGRKCFGQCLCGYD or GSACGPCFTTDPQMAEKCSDCCGGIGTCYGPQCLCNRL or GSMCMPCFTTRPNMAQQCRDCCRGRGKCFGPQ or CLCG or GSMCMPCFTTRPNMAQQCRDCCRGRGKCFGPQCLCGYD or GSMCMPCFTTNLNMEQECRDCCGGTGRCFGPQCLCG or GSGCMPCFTTDRYMARKCKECCRGYGNCFGPQCLCNRG or GSGCGPCFTTDANMARKCRECCGGNGKCFGPQCLCNRE or GSGCGPCFTTDANMARKCRECCGG or IGKCFGPQCLCNRI or GSMCMPCFTTRPDMAQQCRACCKGRGKCFGPQCLCG or GSMCIPCFTTNPNMAAKCNACCGSRRGSCRGPQCIC or [sequence omitted]; note = CONT. FROM ABOVE: GSCGPCFTTDPYTESKCATCCGGRGKCVGPQCLCNR or GSRCGPCFTTDPQTQAKCS or ECCGRKGGVCKGPQCICG or GSCGPCFTKDPETEKKCATCCGGIGRCFGPQCLCNRG or GSMCMPCFTTDHQMARRCDDCCGGRGRGKCWGPQCLCR or GSAMCMPCFTTDHNMAKKCRDCCGGNGKCFGPQCLCNRG or GSCGPCFTTDWESEKKCAECCGGIGRCFGPQCLCNRK or GSCGPCFTT or DHQTEQKCAECCGGIGKCYGPQCLCRG or GSCGPCFTTDRQMEQKCAECCGGIGKCYGPQCLCRG or GSCGPCFTTDHQTEQKCAECCGGIGKCYGPQCLC or GSCMPCFTTDHQMARKCDDCCGGRGKCYGPQCLCRG or GSRCGPCFTTDPQTQAKCSECCGRKGGVCKGPQCICGIQ or GSRCPP or CFTTNPNMEADCRKCCGGRGYCASYQCICPG or GSCGPCFTTDHNMARKCDECCGGKGRGKCFGPQCLCR or GSVCMPCFTTDQQMARKCSDCCGGKGRGKCYGPQCLCR or GSMCGPCFTTDANMARKCRECCGGIGKCFGPQCLCNRI or GSMCGPCFTTDANMAAACRECCGGIGKCFGPQCLCNRI or GSMCGPCFTTDANMARKCAECCGGIGKCFGPQCLCNRI or GSMCGPCFTTDANMARKCRECCGGIGACFGPQCLCNRI or GSMCGPCFTTDANMARKCRECCGGIGKCFGPQCLCNAI or GSCMPCFTTRPNMAQQCRDCCRGRGKCFGPQCLCGYD or GSMCMPCFTTNLNMEQECRDCCGGTGRCF or GPQCLCGYD or GSCMPCFTTRPNMAQQCRDCCRGRGKCFGPQCLCGYD or MCMPCFTTDHQMARKCDDCCGGKGRGKCYGPQCLCR; note = CONT. FROM ABOVE: MCMPCFTTDHQMARRCDDCCGGRGRGKCYGPQCLCR or MCMPCFTTDHQMARRCDDCCGGRGRGRCYGPQCLCR or MCMPCFTTDHQMARKCDDCCGGRG or RGRCYGPQCLCR or MCMPCFTTDHQMARRCDDCCGGKGRGRCYGPQCLCR or MCMPCFTTHHRMAENCDICCGGDGRGKCYGPQCLCR or MCMPCFTTDTQMQERCDRCCGGGGRGKCWGPQCLCI or MCMPCFTTDTQMQERCDRCCGGGGRGRCWGPQCLCI or MCMPCFTTEQRMAIICDDCCGG or FGRGKCYGPQCLCR or MCMPCFTTEQRMAIICDDCCGGFGRGRCYGPQCLCR or ICIPCFTTDHQIARRCDDCCGGRGRGKCYGPQCICR or ICIPCFTTDHQIARRCDDCCGGRGRGRCYGPQCICR or MCMPCFTTDHRMAENCDICCGGDGRGKCYGPQCLCR or MCMPCFTTDHRMAENCDICC or GGDGRGRCYGPQCLCR or MCMPCFTTEQRMAIICDDCCGGFGRGKCYGPQCLCI or MCMPCFTTEQRMAIICDDCCGGFGRGRCYGPQCLCI or ICIPCFTTDHQIARRCDDCCGGRGRGKCYGPQCICI or ICIPCFTTDHQIARRCDDCCGGRGRGRCYGPQCICI or MCMPCFTTDHRMAENCDI or CCGGDGRGKCYGPQCLCI or MCMPCFTTDHRMAENCDICCGGDGRGRCYGPQCLCI or MCMPCFTTDTQMQEKCDRCCGGGGRGRCWGPQCLCI or MCMPCFTTEQRMAIKCDDCCGGFGRGRCYGPQCLCR or ICIPCFTTDHQIARKCDDCCGGRGRGRCYGPQCICR or MCMPCFTTDHRMAEKC or DICCGGDGRGRCYGPQCLCR or MCMPCFTTDTQMQERCDRCCGGKGRGRCWGPQCLCI; note = CONT. FROM ABOVE: MCMPCFTTEQRMAIICDDCCGGKGRGRCYGPQCLCR or ICIPCFTTDHQIARRCDDCCGGKGRGRCYGPQCICR or MCMPCFTTDHRMAENCDICCGGKGRGRCYGPQCLCR or MCMPCFTTHHRMAE or NCDICCGGDGRGRCYGPQCLCR or MCMPCFTTDTQMQERCDRCCGGGGRGRCWGPQCLC or MCMPCFTTEQRMAIICDDCCGGFGRGRCYGPQCLC or ICIPCFTTDHQIARRCDDCCGGRGRGRCYGPQCIC or MCMPCFTTDHRMAENCDICCGGDGRGRCYGPQCLC or MCMPCFTTDHQMARRC or DDCCGGRGRGRCYGPQCLCI or ACAPCFTTDHQAARRCDDCCGGRGRGKCYGPQCLCR or ACAPCFTTDHQAARKCDDCCGGKGRGKCYGPQCLCR or MCMPCFTTHHRMAENCDICCGGDGRGKCYGPQCLCI or MCMPCFTTHHRMAENCDICCGGDGRGKCYGPQCLC or MCMPCFTTDHQMARR or CDDCCGGRGRGRCYGPQCLC or MCMPCFTTHHQMAENCDICCGGDGRGKCYGPQCLCR or MCMPCFTTHHRMARNCDICCGGDGRGKCYGPQCLCR or MCMPCFTTHHRMAERCDICCGGDGRGKCYGPQCLCR or MCMPCFTTHHRMAENCDDCCGGDGRGKCYGPQCLCR or RCMPCFTTDHQMAR or RCDDCCGGRGRGKCYGPQCLCR or ICIPCFTTDHQIARRCDDCCGGRGRGKCYGPQCLCR or MCLPCFTTDHQLARRCDDCCGGRGRGKCYGPQCLCR or MCMPCFTTEHQMARRCEECCGGRGRGKCYGPQCLCR or MCIPCFTTDHQMARRCEECCGGRGRGKCYGPQCLCR or ICIPCFTTDHQM or ARRCDDCCGGRGDGKCYGPQCLCR; note = CONT. FROM ABOVE: RCMPCFTTDHFMARFCDFCCGGRGRGKCYGPQCLCR or RCMPCFTTDHYMARYCDYCCGGRGRGKCYGPQCLCR or RCMPCFTTDHRMARRCDRCCGGRGRGKCYGPQCLCR or RCMPCFTTDHEMARECDECCGGRGRGKCYGPQCLCR or RCMPCFTTDH or HMARHCDHCCGGRGRGKCYGPQCLCR or LCLPCFTTHHRLADQCDICCGGDGRGKCYGPQCLCR or ICIPCFTTEHQIARRCEECCGGRGRGKCYGPQCLCR or MCMPCFTTIYRMAHECDECCGGRGRGKCYGPQCLCR or MCMPCFTTGYRMAEYCDICCGGRGRGKCYGPQCLCR or MCMPCFTT or HRRMANTCDACCGGRSRGKCYGPQCLCR or HCMPCFTTDHQMIRRCDDCCGGGSYGKCDGPQCLCF or DCMPCFTTDHRMADHCDICCGGDDRGKCYGPQCLCR or MCMPCFTTDHEMERRCDDCCGIGGGGKCHGPQCLCG or MCMPCFTTSEQMFRRCDDCCGGWGDGKCNGPHCLCR or CGPCFT or TDHQMEQKCAECCGGIGKCYGPQCLCNR or RCGPCFTTDPQTQAKCSECCGRKGGVCKGPQCICGIQY or MCMPCFTTDPNMAKKCRDCCGGNGKCFGPQCLCNR or MCMPCFTTDHNMAKKCNDCCGGYGKCFGPQCLCR or RCPPCFTTNPNMEADCRKCCGGRGYCASYQCICPGG or MCMPCFT or TDPNMANKCRDCCGGGKKCFGPQCLCNR or MKFLYGVILIALFLTVMTATLSEARCGPCFTTDPQTQAKCSECCGRKGGVCKGPQCICG IQY or MCMPCFTTRPDMAQQCRACCKGRGKCFGPQCLCGYD or MKFLYGIVFIALFLTVMTATLSDAMCMPCFTTDHNMAKKCRDCCGGNGKCFGPQCLCNR G; note = CONT. FROM ABOVE: MCMPCFTTDHNMAKKCRDCCGGNGKCFGPQCLCNR or MKFLYGIVFITLFLTVMIATHTEAMCMPCFTTRPNMAQQCRDCCRGRGKCFGPQCLCGY D or MKFLYGIVFIALFLTVMIATHTEAMCMPCFTTRPNMAQQCRDCCRGRGKCFGPQCLCGY D or RCKPCFTTDPQMSKKCADCCGGKGKGKCYGPQC or LC or MKFLYGIVFITLFLTVMIATHTEAAMCMPCFTTNLNMEQECRDCCGGTGRCFGPQCLCG YD or RCSPCFTTDQQMTKKCYDCCGGKGKGKCYGPQCICAPY or CGPCFTTDPYTESKCATCCGGRGKCVGPQCLCNRI or TEAMCMPCFTTDHNMAKKCRDCCGGNGKCFGYQCLCNRG or MKF or LYGIVFIALFLTVMFATQTDGCGPCFTTDANMARKCRECCGGIGKCFGPQCLCNRI or MKFLYGIVFIALFLTVMFATQTDGCGPCFTTDANMARKCRECCGGNGKCFGPQCLCNRE or MKFLYGTILIAFFLTVMIATHSEARCPPCFTTNPNMEADCRKCCGGRGYCASYQCICPG G or TEAMCMPCFTTRPDM or AQQCRDCCGGNGKCFGYQCLCNRG or [sequence omitted] G or [sequence omitted] G or MKFLYGIILIALFLTVMIATHSEARCPNCFTTNPNAEADCKKCCGN or RWGKCAGYQCVCPMK or [sequence omitted] GRIVIMYT or MCMPCFTTRPGMAQQCRDCCGGNGKCFGYQCLCNR; note = CONT. FROM ABOVE: MCIPCFTTNPNMAAKCNACCGSRRGSCRGPQCICR or MCIPCFTTNPNMAAKCNACCGSRRGSCRGPQC or ICN or MCIPCFTTNPNMAAKCNACCGGNGSCRGPQCICN or MCIPCFTTNPNMAAKCNACCGSRGRGSCRGPQCICN or MCIPCFTTNPNMAAKCNACCGSRGRGKCRGPQCICN or MCIPCFTTDHQMAAKCNACCGSRRGSCRGPQCICN or MCIPCFTTNHQMAAKCNACCGSRRGSCRGPQCIC or N or MCIPCFTTNPNMARKCNACCGSRGRGSCRGPQCICN or MCIPCFTTNPNMAAKCNACCGGKGRGSCRGPQCICN or MCIPCFTTNPNMAAKCNACCGSRRGSCFGPQCICN or MCIPCFTTNPNMAAKCNACCGSRGRGKCFGPQCICN or MCIPCFTTNPNMAAKCNACCGSRGRGSCFGPQCI or CN or MCIPCFTTNPNMAAKCNACCGSRGRGSCYGPQCICN or MCIPCFTTNPNMAAKCDACCGSRRGSCRGPQCICN or MCIPCFTTNHQMAAKCDACCGSRRGSCRGPQCICN or MCIPCFTTNHNMAAKCDACCGGRGRGSCRGPQCICN or MCIPCFTTNPNMAAKCDACCGSRGRGSCRGPQCI or CN or MCIPCFTTNPNMAAKCDACCGGKGRGSCRGPQCICN or MCIPCFTTNHNMAAKCDACCGSRGRGSCRGPQCICN or MCIPCFTTNPNMAAKCRDCCGGRGSCRGPQCICN or MCMPCFTTNPNMAAKCDDCCGSRGRGSCRGPQCICN or MCIPCFTTNPNMAARCNACCGSRRGSCRGPQCIC or MCIPCFTTNPNMAAKCNACCGSRRGSCRGPQCICI or MCMPCFTTDHQMARACDDCCGGKGRGKCYGPQCLCR; note = CONT. FROM ABOVE: MCMPCFTTDHQMARRCDDCCGGKGRGKCYGPQCLCR or MCMPCFTTDHQMARKCDDCCGGAGRGKCYGPQCLCR or MCMPCFTTDHQMARACDDCCGGAGRGKCYGPQCLC or R or MCMPCFTTDHQMARRCDDCCGGAGRGKCYGPQCLCR or MCMPCFTTDHQMARKCDDCCGGRGRGKCYGPQCLCR or MCMPCFTTDHQMARACDDCCGGRGRGKCYGPQCLCR or MCMPCFTTDHQMARKCDDCCGGKGRGACYGPQCLCR or MCMPCFTTDHQMARACDDCCGGKGRGACYGPQC or LCR or MCMPCFTTDHQMARRCDDCCGGKGRGACYGPQCLCR or MCMPCFTTDHQMARKCDDCCGGAGRGACYGPQCLCR or MCMPCFTTDHQMARACDDCCGGAGRGACYGPQCLCR or MCMPCFTTDHQMARRCDDCCGGAGRGACYGPQCLCR or MCMPCFTTDHQMARKCDDCCGGRGRGACYGP or QCLCR or MCMPCFTTDHQMARACDDCCGGRGRGACYGPQCLCR or MCMPCFTTDHQMARRCDDCCGGRGRGACYGPQCLCR or MCMPCFTTDHQMARKCDDCCGGKGRGRCYGPQCLCR or MCMPCFTTDHQMARACDDCCGGKGRGRCYGPQCLCR or MCMPCFTTDHQMARKCDDCCGGAGRGRCY or GPQCLCR or MCMPCFTTDHQMARACDDCCGGAGRGRCYGPQCLCR or MCMPCFTTDHQMARRCDDCCGGAGRGRCYGPQCLCR or MCMPCFTTDHQMARACDDCCGGRGRGRCYGPQCLCR or KCMPCFTTDHQMARRCDDCCGGRGRGRCYGPQCLCR or ACAPCFTTDHQAARRCDDCCGGRGRGR or CYGPQCLCR or KCAPCFTTDHQAARRCDDCCGGRGRGRCYGPQCLCR; note = CONT. FROM ABOVE: MCMPCFTTDHQMARCDDCCGGGRGKCYGPQCLCR or MCMPCFTTDHQMARCDDCCGGGRGCYGPQCLCR or KCMPCFTTDHQMARCDDCCGGGRGCYGPQCLCR or ACAPCFTTDHQAARCDDCCGGGRGKCYGPQCLC or R or ACAPCFTTDHQAARCDDCCGGGRGCYGPQCLCR or KCAPCFTTDHQAARCDDCCGGGRGCYGPQCLCR or MCMPCFTTDHQMARKCDDCCGGKGRGKCYGPQCLCRGAGAAGG or MCMPCFTTDHQMARACDDCCGGKGRGKCYGPQCLCRGAGAAGG or MCMPCFTTDHQMARRCDDCCGGKGR or GKCYGPQCLCRGAGAAGG or MCMPCFTTDHQMARKCDDCCGGAGRGKCYGPQCLCRGAGAAGG or MCMPCFTTDHQMARACDDCCGGAGRGKCYGPQCLCRGAGAAGG or MCMPCFTTDHQMARRCDDCCGGAGRGKCYGPQCLCRGAGAAGG or MCMPCFTTDHQMARKCDDCCGGRGRGKCYGPQCLCRG or AGAAGG or MCMPCFTTDHQMARACDDCCGGRGRGKCYGPQCLCRGAGAAGG or MCMPCFTTDHQMARRCDDCCGGRGRGKCYGPQCLCRGAGAAGG or MCMPCFTTDHQMARKCDDCCGGKGRGACYGPQCLCRGAGAAGG or MCMPCFTTDHQMARACDDCCGGKGRGACYGPQCLCRGAGAAGG or MCMPCFTTDHQMARRCDDCCGGKGRGACYGPQCLCRGAGAAGG or MCMPCFTTDHQMARKCDDCCGGAGRGACYGPQCLCRGAGAAGG or MCMPCFTTDHQMARACDDCCGGAGRGACYGPQCLCRGAGAAGG or MCMPCFTTDHQMARRCDDCCGGAGRGACYGPQCLCRGAGAAGG or MCMPCFTTDHQM; note = CONT. FROM ABOVE: ARKCDDCCGGRGRGACYGPQCLCRGAGAAGG or MCMPCFTTDHQMARACDDCCGGRGRGACYGPQCLCRGAGAAGG or MCMPCFTTDHQMARRCDDCCGGRGRGACYGPQCLCRGAGAAGG or MCMPCFTTDHQMARKCDDCCGGKGRGRCYGPQCLCRGAGAAGG or MCMPCFTTDHQMARACDDCCGGKG or RGRCYGPQCLCRGAGAAGG or MCMPCFTTDHQMARRCDDCCGGKGRGRCYGPQCLCRGAGAAGG or MCMPCFTTDHQMARKCDDCCGGAGRGRCYGPQCLCRGAGAAGG or MCMPCFTTDHQMARACDDCCGGAGRGRCYGPQCLCRGAGAAGG or MCMPCFTTDHQMARRCDDCCGGAGRGRCYGPQCLCR or GAGAAGG or MCMPCFTTDHQMARKCDDCCGGRGRGRCYGPQCLCRGAGAAGG or MCMPCFTTDHQMARACDDCCGGRGRGRCYGPQCLCRGAGAAGG or MCMPCFTTDHQMARRCDDCCGGRGRGRCYGPQCLCRGAGAAGG or KCMPCFTTDHQMARRCDDCCGGRGRGRCYGPQCLCRGAGAAGG or ACAPCFTTDHQAARRCDDCCGGRGRGRCYGPQCLCRGAGAAGG or KCAPCFTTDHQAARRCDDCCGGRGRGRCYGPQCLCRGAGAAGG or MCMPCFTTDHQMARCDDCCGGGRGKCYGPQCLCRGAGAAGG or MCMPCFTTDHQMARCDDCCGGGRGCYGPQCLCRGAGAAGG or KCMPCFTTDHQMARCD or DCCGGGRGCYGPQCLCRGAGAAGG or ACAPCFTTDHQAARCDDCCGGGRGKCYGPQCLCRGAGAAGG or ACAPCFTTDHQAARCDDCCGGGRGCYGPQCLCRGAGAAGG or KCAPCFTTDHQAARCDDCCGGGRGCYGPQCLCRGAGAAGG; note = CONT. FROM ABOVE: MCMPCFTTDHQMVRKCDDCCGGKGRGKCYGPQCLCR or MCMPCFTTDHQMVRVCDDCCGGKGRGKCYGPQCLCR or MCMPCFTTDHQMVRRCDDCCGGKGRGKCYGPQCLCR or MCMPCFTTDHQMVRKCDDCCGGVGRGKCYGPQCLCR or MCMPCFTTDHQMVRVCDDCCGGVGRGKCYGPQCLCR or MCMPCFTTDHQMVRRCDDCCGGVGRGKCYGPQCLCR or MCMPCFTTDHQMVRKCDDCCGGRGRGKCYGPQCLCR or MCMPCFTTDHQMVRVCDDCCGGRGRGKCYGPQCLCR or MCMPCFTTDHQMVRRCDDCCGGRGRGKCYGPQCLCR or MCMPCFTTDHQMVRKCDDCCGGKGRGVCYGPQCLCR or MCMPCFTTDHQMVRVCDDCCGGKGRGVCYGPQCLC or R or MCMPCFTTDHQMVRRCDDCCGGKGRGVCYGPQCLCR or MCMPCFTTDHQMVRKCDDCCGGVGRGVCYGPQCLCR or MCMPCFTTDHQMVRVCDDCCGGVGRGVCYGPQCLCR or MCMPCFTTDHQMVRRCDDCCGGVGRGVCYGPQCLCR or MCMPCFTTDHQMVRKCDDCCGGRGRGVCYGPQC or LCR or MCMPCFTTDHQMVRVCDDCCGGRGRGVCYGPQCLCR or MCMPCFTTDHQMVRRCDDCCGGRGRGVCYGPQCLCR or MCMPCFTTDHQMVRKCDDCCGGKGRGRCYGPQCLCR or MCMPCFTTDHQMVRVCDDCCGGKGRGRCYGPQCLCR or MCMPCFTTDHQMVRRCDDCCGGKGRGRCYGP or QCLCR or MCMPCFTTDHQMVRKCDDCCGGVGRGRCYGPQCLCR or MCMPCFTTDHQMVRVCDDCCGGVGRGRCYGPQCLCR or MCMPCFTTDHQMVRRCDDCCGGVGRGRCYGPQCLCR; note = CONT. FROM ABOVE: MCMPCFTTDHQMVRKCDDCCGGRGRGRCYGPQCLCR or MCMPCFTTDHQMVRVCDDCCGGRGRGRCY or GPQCLCR or MCMPCFTTDHQMVRRCDDCCGGRGRGRCYGPQCLCR or KCMPCFTTDHQMVRRCDDCCGGRGRGRCYGPQCLCR or VCVPCFTTDHQVVRRCDDCCGGRGRGRCYGPQCLCR or KCVPCFTTDHQVVRRCDDCCGGRGRGRCYGPQCLCR or MCMPCFTTDHQMVRCDDCCGGGRGKCY or GPQCLCR or MCMPCFTTDHQMVRCDDCCGGGRGCYGPQCLCR or KCMPCFTTDHQMVRCDDCCGGGRGCYGPQCLCR or VCVPCFTTDHQVVRCDDCCGGGRGKCYGPQCLCR or VCVPCFTTDHQVVRCDDCCGGGRGCYGPQCLCR or KCVPCFTTDHQVVRCDDCCGGGRGCYGPQCLCR or MCMPCFTTDHQMVRKCDDCCGGKGRGKCYGPQCLCRGAGAAGG or MCMPCFTTDHQMVRVCDDCCGGKGRGKCYGPQCLCRGAGAAGG or MCMPCFTTDHQMVRRCDDCCGGKGRGKCYGPQCLCRGAGAAGG or MCMPCFTTDHQMVRKCDDCCGGVGRGKCYGPQCLCRGAGAAGG or MCMPCFTTDHQ or MVRVCDDCCGGVGRGKCYGPQCLCRGAGAAGG or MCMPCFTTDHQMVRRCDDCCGGVGRGKCYGPQCLCRGAGAAGG or MCMPCFTTDHQMVRKCDDCCGGRGRGKCYGPQCLCRGAGAAGG or MCMPCFTTDHQMVRVCDDCCGGRGRGKCYGPQCLCRGAGAAGG or MCMPCFTTDHQMVRRCDDCCGGR or GRGKCYGPQCLCRGAGAAGG or MCMPCFTTDHQMVRKCDDCCGGKGRGVCYGPQCLCRGAGAAGG; note = CONT. FROM ABOVE: MCMPCFTTDHQMVRVCDDCCGGKGRGVCYGPQCLCRGAGAAGG or MCMPCFTTDHQMVRRCDDCCGGKGRGVCYGPQCLCRGAGAAGG or MCMPCFTTDHQMVRKCDDCCGGVGRGVCYGPQCLC or RGAGAAGG or MCMPCFTTDHQMVRVCDDCCGGVGRGVCYGPQCLCRGAGAAGG or MCMPCFTTDHQMVRRCDDCCGGVGRGVCYGPQCLCRGAGAAGG or MCMPCFTTDHQMVRKCDDCCGGRGRGVCYGPQCLCRGAGAAGG or MCMPCFTTDHQMVRVCDDCCGGRGRGVCYGPQCLCRGAGAAGG or MCMPCFTTDHQMVRRCDDCCGGRGRGVCYGPQCLCRGAGAAGG or MCMPCFTTDHQMVRKCDDCCGGKGRGRCYGPQCLCRGAGAAGG or MCMPCFTTDHQMVRVCDDCCGGKGRGRCYGPQCLCRGAGAAGG or MCMPCFTTDHQMVRRCDDCCGGKGRGRCYGPQCLCRGAGAAGG or MCMPCFTTDH or QMVRKCDDCCGGVGRGRCYGPQCLCRGAGAAGG or MCMPCFTTDHQMVRVCDDCCGGVGRGRCYGPQCLCRGAGAAGG or MCMPCFTTDHQMVRRCDDCCGGVGRGRCYGPQCLCRGAGAAGG or MCMPCFTTDHQMVRKCDDCCGGRGRGRCYGPQCLCRGAGAAGG or MCMPCFTTDHQMVRVCDDCCGG or RGRGRCYGPQCLCRGAGAAGG or MCMPCFTTDHQMVRRCDDCCGGRGRGRCYGPQCLCRGAGAAGG or KCMPCFTTDHQMVRRCDDCCGGRGRGRCYGPQCLCRGAGAAGG or VCVPCFTTDHQVVRRCDDCCGGRGRGRCYGPQCLCRGAGAAGG or KCVPCFTTDHQVVRRCDDCCGGRGRGRCYGPQCL or CRGAGAAGG; note = CONT. FROM ABOVE: MCMPCFTTDHQMVRCDDCCGGGRGKCYGPQCLCRGAGAAGG or MCMPCFTTDHQMVRCDDCCGGGRGCYGPQCLCRGAGAAGG or KCMPCFTTDHQMVRCDDCCGGGRGCYGPQCLCRGAGAAGG or VCVPCFTTDHQVVRCDDCCGGGRGKCYGPQCLCRGAGAAGG or VCVPCFT or TDHQVVRCDDCCGGGRGCYGPQCLCRGAGAAGG or KCVPCFTTDHQVVRCDDCCGGGRGCYGPQCLCRGAGAAGG or MCMPCFTTDHQMLRKCDDCCGGKGRGKCYGPQCLCR or MCMPCFTTDHQMLRLCDDCCGGKGRGKCYGPQCLCR or MCMPCFTTDHQMLRRCDDCCGGKGRGKCYGPQCLCR or MCMPCFTTDHQMLRKCDDCCGGLGRGKCYGPQCLCR or MCMPCFTTDHQMLRLCDDCCGGLGRGKCYGPQCLCR or MCMPCFTTDHQMLRRCDDCCGGLGRGKCYGPQCLCR or MCMPCFTTDHQMLRKCDDCCGGRGRGKCYGPQCLCR or MCMPCFTTDHQMLRLCDDCCGGRGRGKCYGPQCLCR or MCMPCFTTDHQMLRRCDDCCGGRGRGKCYGPQCLCR or MCMPCFTTDHQMLRKCDDCCGGKGRGLCYGPQCLCR or MCMPCFTTDHQMLRLCDDCCGGKGRGLCYGPQCLCR or MCMPCFTTDHQMLRRCDDCCGGKGRGLCYGPQCLCR or MCMPCFTTDHQMLRKCDDCCGGLGRGLCYGPQCLC or R or MCMPCFTTDHQMLRLCDDCCGGLGRGLCYGPQCLCR or MCMPCFTTDHQMLRRCDDCCGGLGRGLCYGPQCLCR or MCMPCFTTDHQMLRKCDDCCGGRGRGLCYGPQCLCR or MCMPCFTTDHQMLRLCDDCCGGRGRGLCYGPQCLCR; note = CONT. FROM ABOVE: MCMPCFTTDHQMLRRCDDCCGGRGRGLCYGPQC or LCR or MCMPCFTTDHQMLRKCDDCCGGKGRGRCYGPQCLCR or MCMPCFTTDHQMLRLCDDCCGGKGRGRCYGPQCLCR or MCMPCFTTDHQMLRRCDDCCGGKGRGRCYGPQCLCR or MCMPCFTTDHQMLRKCDDCCGGLGRGRCYGPQCLCR or MCMPCFTTDHQMLRLCDDCCGGLGRGRCYGP or QCLCR or MCMPCFTTDHQMLRRCDDCCGGLGRGRCYGPQCLCR or MCMPCFTTDHQMLRKCDDCCGGRGRGRCYGPQCLCR or MCMPCFTTDHQMLRLCDDCCGGRGRGRCYGPQCLCR or MCMPCFTTDHQMLRRCDDCCGGRGRGRCYGPQCLCR or KCMPCFTTDHQMLRRCDDCCGGRGRGRCY or GPQCLCR or LCLPCFTTDHQLLRRCDDCCGGRGRGRCYGPQCLCR or KCLPCFTTDHQLLRRCDDCCGGRGRGRCYGPQCLCR or MCMPCFTTDHQMLRCDDCCGGGRGKCYGPQCLCR or MCMPCFTTDHQMLRCDDCCGGGRGCYGPQCLCR or KCMPCFTTDHQMLRCDDCCGGGRGCYGPQCLC or R or LCLPCFTTDHQLLRCDDCCGGGRGKCYGPQCLCR or LCLPCFTTDHQLLRCDDCCGGGRGCYGPQCLCR or KCLPCFTTDHQLLRCDDCCGGGRGCYGPQCLCR or MCMPCFTTDHQMLRKCDDCCGGKGRGKCYGPQCLCRGAGAAGG or MCMPCFTTDHQMLRLCDDCCGGKGRGKCYGPQCL or CRGAGAAGG or MCMPCFTTDHQMLRRCDDCCGGKGRGKCYGPQCLCRGAGAAGG or MCMPCFTTDHQMLRKCDDCCGGLGRGKCYGPQCLCRGAGAAGG; note = CONT. FROM ABOVE: MCMPCFTTDHQMLRLCDDCCGGLGRGKCYGPQCLCRGAGAAGG or MCMPCFTTDHQMLRRCDDCCGGLGRGKCYGPQCLCRGAGAAGG or MCMPCFTTDHQMLRKCDDCCGGRGRGKCYGPQCLCRGAGAAGG or MCMPCFTTDHQMLRLCDDCCGGRGRGKCYGPQCLCRGAGAAGG or MCMPCFTTDHQMLRRCDDCCGGRGRGKCYGPQCLCRGAGAAGG or MCMPCFTTDHQMLRKCDDCCGGKGRGLCYGPQCLCRGAGAAGG or MCMPCFTTD or HQMLRLCDDCCGGKGRGLCYGPQCLCRGAGAAGG or MCMPCFTTDHQMLRRCDDCCGGKGRGLCYGPQCLCRGAGAAGG or MCMPCFTTDHQMLRKCDDCCGGLGRGLCYGPQCLCRGAGAAGG or MCMPCFTTDHQMLRLCDDCCGGLGRGLCYGPQCLCRGAGAAGG or MCMPCFTTDHQMLRRCDDCCG or GLGRGLCYGPQCLCRGAGAAGG or MCMPCFTTDHQMLRKCDDCCGGRGRGLCYGPQCLCRGAGAAGG or MCMPCFTTDHQMLRLCDDCCGGRGRGLCYGPQCLCRGAGAAGG or MCMPCFTTDHQMLRRCDDCCGGRGRGLCYGPQCLCRGAGAAGG or MCMPCFTTDHQMLRKCDDCCGGKGRGRCYGPQC or LCRGAGAAGG or MCMPCFTTDHQMLRLCDDCCGGKGRGRCYGPQCLCRGAGAAGG or MCMPCFTTDHQMLRRCDDCCGGKGRGRCYGPQCLCRGAGAAGG or MCMPCFTTDHQMLRKCDDCCGGLGRGRCYGPQCLCRGAGAAGG or MCMPCFTTDHQMLRLCDDCCGGLGRGRCYGPQCLCRGAGAAGG or MCMPCFTTDHQMLRRCDDCCGGLGRGRCYGPQCLCRGAGAAGG; note = CONT. FROM ABOVE: MCMPCFTTDHQMLRKCDDCCGGRGRGRCYGPQCLCRGAGAAGG or MCMPCFTTDHQMLRLCDDCCGGRGRGRCYGPQCLCRGAGAAGG or MCMPCFTTDHQMLRRCDDCCGGRGRGRCYGPQCLCRGAGAAGG or KCMPCFTT or DHQMLRRCDDCCGGRGRGRCYGPQCLCRGAGAAGG or LCLPCFTTDHQLLRRCDDCCGGRGRGRCYGPQCLCRGAGAAGG or KCLPCFTTDHQLLRRCDDCCGGRGRGRCYGPQCLCRGAGAAGG or MCMPCFTTDHQMLRCDDCCGGGRGKCYGPQCLCRGAGAAGG or MCMPCFTTDHQMLRCDDCCGGG or RGCYGPQCLCRGAGAAGG or KCMPCFTTDHQMLRCDDCCGGGRGCYGPQCLCRGAGAAGG or LCLPCFTTDHQLLRCDDCCGGGRGKCYGPQCLCRGAGAAGG or LCLPCFTTDHQLLRCDDCCGGGRGCYGPQCLCRGAGAAGG or KCLPCFTTDHQLLRCDDCCGGGRGCYGPQCLCRGAGAAGG or GCGPCFTTDHQGARKCDDCCGGKGRGKCYGPQCLCR or GCGPCFTTDHQGARACDDCCGGKGRGKCYGPQCLCR or GCGPCFTTDHQGARRCDDCCGGKGRGKCYGPQCLCR or GCGPCFTTDHQGARKCDDCCGGAGRGKCYGPQCLCR or GCGPCFTTDHQGARACDDCCGGAGRGKCYGPQCLCR or GCGPCFTTDHQGARRCDDCCGGAGRGKCYGPQCLCR or GCGPCFTTDHQGARKCDDCCGGRGRGKCYGPQCLCR or GCGPCFTTDHQGARACDDCCGGRGRGKCYGPQCLCR or GCGPCFTTDHQGARRCDDCCGGRGRGKCYGPQCLCR or GCGPCFTTDHQGARKCDDCCGGKGRGACYGPQCLCR; note = CONT. FROM ABOVE: GCGPCFTTDHQGARACDDCCGGKGRGACYGPQCLCR or GCGPCFTTDHQGARRCDDCCGGKGRGACYGPQCLCR or GCGPCFTTDHQGARKCDDCCGGAGRGACYGPQCLCR or GCGPCFTTDHQGARACDDCCGGAGRGACYGPQCLCR or GCGPCFTTDHQGARRCDDCCGGAGRGACYGPQCLCR or GCGPCFTTDHQGARKCDDCCGGRGRGACYGPQCLCR or GCGPCFTTDHQGARACDDCCGGRGRGACYGPQCLCR or GCGPCFTTDHQGARRCDDCCGGRGRGACYGPQCLCR or GCGPCFTTDHQGARKCDDCCGGKGRGRCYGPQCLCR or GCGPCFTTDHQGARACDDCCGGKGRGRCYGPQCL or CR or GCGPCFTTDHQGARRCDDCCGGKGRGRCYGPQCLCR or GCGPCFTTDHQGARKCDDCCGGAGRGRCYGPQCLCR or GCGPCFTTDHQGARACDDCCGGAGRGRCYGPQCLCR or GCGPCFTTDHQGARRCDDCCGGAGRGRCYGPQCLCR or GCGPCFTTDHQGARKCDDCCGGRGRGRCYGPQ or CLCR or GCGPCFTTDHQGARACDDCCGGRGRGRCYGPQCLCR or GCGPCFTTDHQGARRCDDCCGGRGRGRCYGPQCLCR or KCGPCFTTDHQGARRCDDCCGGRGRGRCYGPQCLCR or GCGPCFTTDHQGARCDDCCGGGRGKCYGPQCLCR or GCGPCFTTDHQGARCDDCCGGGRGCYGPQCLC or R or KCGPCFTTDHQGARCDDCCGGGRGCYGPQCLCR or ACAPCFTTDHQAARACDDCCGGKGRGKCYGPQCLCR or ACAPCFTTDHQAARRCDDCCGGKGRGKCYGPQCLCR or ACAPCFTTDHQAARKCDDCCGGAGRGKCYGPQCLCR; note = CONT. FROM ABOVE: ACAPCFTTDHQAARACDDCCGGAGRGKCYGPQCLCR or ACAPCFTTDHQAARRCDDCCGGAGRGKCYGPQCLCR or ACAPCFTTDHQAARKCDDCCGGRGRGKCYGPQCLCR or ACAPCFTTDHQAARACDDCCGGRGRGKCYGPQCLCR or ACAPCFTTDHQAARKCDDCCGGKGRGACYGPQCLCR or ACAPCFTTDHQAARACDDCCGGKGRGACYGPQCL or CR or ACAPCFTTDHQAARRCDDCCGGKGRGACYGPQCLCR or ACAPCFTTDHQAARKCDDCCGGAGRGACYGPQCLCR or ACAPCFTTDHQAARACDDCCGGAGRGACYGPQCLCR or ACAPCFTTDHQAARRCDDCCGGAGRGACYGPQCLCR or ACAPCFTTDHQAARKCDDCCGGRGRGACYGPQ or CLCR or ACAPCFTTDHQAARACDDCCGGRGRGACYGPQCLCR or ACAPCFTTDHQAARRCDDCCGGRGRGACYGPQCLCR or ACAPCFTTDHQAARKCDDCCGGKGRGRCYGPQCLCR or ACAPCFTTDHQAARACDDCCGGKGRGRCYGPQCLCR or ACAPCFTTDHQAARRCDDCCGGKGRGRCYG or PQCLCR or ACAPCFTTDHQAARKCDDCCGGAGRGRCYGPQCLCR or ACAPCFTTDHQAARACDDCCGGAGRGRCYGPQCLCR or ACAPCFTTDHQAARRCDDCCGGAGRGRCYGPQCLCR or ACAPCFTTDHQAARKCDDCCGGRGRGRCYGPQCLCR or ACAPCFTTDHQAARACDDCCGGRGRGRC or YGPQCLCR or ICIPCFTTDHQIARKCDDCCGGKGRGKCYGPQCLCR or ICIPCFTTDHQIARACDDCCGGKGRGKCYGPQCLCR or ICIPCFTTDHQIARRCDDCCGGKGRGKCYGPQCLCR; note = CONT. FROM ABOVE: ICIPCFTTDHQIARKCDDCCGGAGRGKCYGPQCLCR or ICIPCFTTDHQIARACDDCCGGAGRG or KCYGPQCLCR or ICIPCFTTDHQIARRCDDCCGGAGRGKCYGPQCLCR or ICIPCFTTDHQIARKCDDCCGGRGRGKCYGPQCLCR or ICIPCFTTDHQIARACDDCCGGRGRGKCYGPQCLCR or ICIPCFTTDHQIARKCDDCCGGKGRGACYGPQCLCR or ICIPCFTTDHQIARACDDCCGGKG or RGACYGPQCLCR or ICIPCFTTDHQIARRCDDCCGGKGRGACYGPQCLCR or ICIPCFTTDHQIARKCDDCCGGAGRGACYGPQCLCR or ICIPCFTTDHQIARACDDCCGGAGRGACYGPQCLCR or ICIPCFTTDHQIARRCDDCCGGAGRGACYGPQCLCR or ICIPCFTTDHQIARKCDDCCGG or RGRGACYGPQCLCR or ICIPCFTTDHQIARACDDCCGGRGRGACYGPQCLCR or ICIPCFTTDHQIARRCDDCCGGRGRGACYGPQCLCR or ICIPCFTTDHQIARKCDDCCGGKGRGRCYGPQCLCR or ICIPCFTTDHQIARACDDCCGGKGRGRCYGPQCLCR or ICIPCFTTDHQIARRCDDCC or GGKGRGRCYGPQCLCR or ICIPCFTTDHQIARKCDDCCGGAGRGRCYGPQCLCR or ICIPCFTTDHQIARACDDCCGGAGRGRCYGPQCLCR or ICIPCFTTDHQIARRCDDCCGGAGRGRCYGPQCLCR or ICIPCFTTDHQIARKCDDCCGGRGRGRCYGPQCLCR or ICIPCFTTDHQIARACDD or CCGGRGRGRCYGPQCLCR or ICIPCFTTDHQIARRCDDCCGGRGRGRCYGPQCLCR or KCIPCFTTDHQIARRCDDCCGGRGRGRCYGPQCLCR; note = CONT. FROM ABOVE: ICIPCFTTDHQIARCDDCCGGGRGKCYGPQCLCR or ICIPCFTTDHQIARCDDCCGGGRGCYGPQCLCR or KCIPCFTTDHQIARCDDCCGG or GRGCYGPQCLCR or TCTPCFTTDHQTARKCDDCCGGKGRGKCYGPQCLCR or TCTPCFTTDHQTARACDDCCGGKGRGKCYGPQCLCR or TCTPCFTTDHQTARRCDDCCGGKGRGKCYGPQCLCR or TCTPCFTTDHQTARKCDDCCGGAGRGKCYGPQCLCR or TCTPCFTTDHQTARACDDCCGG or AGRGKCYGPQCLCR or TCTPCFTTDHQTARRCDDCCGGAGRGKCYGPQCLCR or TCTPCFTTDHQTARKCDDCCGGRGRGKCYGPQCLCR or TCTPCFTTDHQTARACDDCCGGRGRGKCYGPQCLCR or TCTPCFTTDHQTARRCDDCCGGRGRGKCYGPQCLCR or TCTPCFTTDHQTARKCDDCC or GGKGRGACYGPQCLCR or TCTPCFTTDHQTARACDDCCGGKGRGACYGPQCLCR or TCTPCFTTDHQTARRCDDCCGGKGRGACYGPQCLCR or TCTPCFTTDHQTARKCDDCCGGAGRGACYGPQCLCR or TCTPCFTTDHQTARACDDCCGGAGRGACYGPQCLCR or TCTPCFTTDHQTARRCDD or CCGGAGRGACYGPQCLCR or TCTPCFTTDHQTARKCDDCCGGRGRGACYGPQCLCR or TCTPCFTTDHQTARACDDCCGGRGRGACYGPQCLCR or TCTPCFTTDHQTARRCDDCCGGRGRGACYGPQCLCR or TCTPCFTTDHQTARKCDDCCGGKGRGRCYGPQCLCR or TCTPCFTTDHQTARAC or DDCCGGKGRGRCYGPQCLCR or TCTPCFTTDHQTARRCDDCCGGKGRGRCYGPQCLCR; note = CONT. FROM ABOVE: TCTPCFTTDHQTARKCDDCCGGAGRGRCYGPQCLCR or TCTPCFTTDHQTARACDDCCGGAGRGRCYGPQCLCR or TCTPCFTTDHQTARRCDDCCGGAGRGRCYGPQCLCR or TCTPCFTTDHQTAR or KCDDCCGGRGRGRCYGPQCLCR or TCTPCFTTDHQTARACDDCCGGRGRGRCYGPQCLCR or TCTPCFTTDHQTARRCDDCCGGRGRGRCYGPQCLCR or KCTPCFTTDHQTARRCDDCCGGRGRGRCYGPQCLCR or TCTPCFTTDHQTARCDDCCGGGRGKCYGPQCLCR or TCTPCFTTDHQTAR or CDDCCGGGRGCYGPQCLCR or KCTPCFTTDHQTARCDDCCGGGRGCYGPQCLCR or VCVPCFTTDHQVARKCDDCCGGKGRGKCYGPQCLCR or VCVPCFTTDHQVARACDDCCGGKGRGKCYGPQCLCR or VCVPCFTTDHQVARRCDDCCGGKGRGKCYGPQCLCR or VCVPCFTTDHQVARKCDD or CCGGAGRGKCYGPQCLCR or VCVPCFTTDHQVARACDDCCGGAGRGKCYGPQCLCR or VCVPCFTTDHQVARRCDDCCGGAGRGKCYGPQCLCR or VCVPCFTTDHQVARKCDDCCGGRGRGKCYGPQCLCR or VCVPCFTTDHQVARACDDCCGGRGRGKCYGPQCLCR or VCVPCFTTDHQVARRC or DDCCGGRGRGKCYGPQCLCR or VCVPCFTTDHQVARKCDDCCGGKGRGACYGPQCLCR or VCVPCFTTDHQVARACDDCCGGKGRGACYGPQCLCR or VCVPCFTTDHQVARRCDDCCGGKGRGACYGPQCLCR or VCVPCFTTDHQVARKCDDCCGGAGRGACYGPQCLCR or VCVPCFTTDHQVAR or ACDDCCGGAGRGACYGPQCLCR; note = CONT. FROM ABOVE: VCVPCFTTDHQVARRCDDCCGGAGRGACYGPQCLCR or VCVPCFTTDHQVARKCDDCCGGRGRGACYGPQCLCR or VCVPCFTTDHQVARACDDCCGGRGRGACYGPQCLCR or VCVPCFTTDHQVARRCDDCCGGRGRGACYGPQCLCR or VCVPCFTTDHQV or ARKCDDCCGGKGRGRCYGPQCLCR or VCVPCFTTDHQVARACDDCCGGKGRGRCYGPQCLCR or VCVPCFTTDHQVARRCDDCCGGKGRGRCYGPQCLCR or VCVPCFTTDHQVARKCDDCCGGAGRGRCYGPQCLCR or VCVPCFTTDHQVARACDDCCGGAGRGRCYGPQCLCR or VCVPCFTTDH or QVARRCDDCCGGAGRGRCYGPQCLCR or VCVPCFTTDHQVARKCDDCCGGRGRGRCYGPQCLCR or VCVPCFTTDHQVARACDDCCGGRGRGRCYGPQCLCR or VCVPCFTTDHQVARRCDDCCGGRGRGRCYGPQCLCR or KCVPCFTTDHQVARRCDDCCGGRGRGRCYGPQCLCR or VCVPCFTT or DHQVARCDDCCGGGRGKCYGPQCLCR or VCVPCFTTDHQVARCDDCCGGGRGCYGPQCLCR or KCVPCFTTDHQVARCDDCCGGGRGCYGPQCLCR or LCLPCFTTDHQLARKCDDCCGGKGRGKCYGPQCLCR or LCLPCFTTDHQLARACDDCCGGKGRGKCYGPQCLCR or LCLPCFTTDHQLAR or RCDDCCGGKGRGKCYGPQCLCR or LCLPCFTTDHQLARKCDDCCGGAGRGKCYGPQCLCR or LCLPCFTTDHQLARACDDCCGGAGRGKCYGPQCLCR or LCLPCFTTDHQLARRCDDCCGGAGRGKCYGPQCLCR or LCLPCFTTDHQLARKCDDCCGGRGRGKCYGPQCLCR or LCLPCFTTDHQL; note = CONT. FROM ABOVE: ARACDDCCGGRGRGKCYGPQCLCR or LCLPCFTTDHQLARRCDDCCGGRGRGKCYGPQCLCR or LCLPCFTTDHQLARKCDDCCGGKGRGACYGPQCLCR or LCLPCFTTDHQLARACDDCCGGKGRGACYGPQCLCR or LCLPCFTTDHQLARRCDDCCGGKGRGACYGPQCLCR or LCLPCFTTDH or QLARKCDDCCGGAGRGACYGPQCLCR or LCLPCFTTDHQLARACDDCCGGAGRGACYGPQCLCR or LCLPCFTTDHQLARRCDDCCGGAGRGACYGPQCLCR or LCLPCFTTDHQLARKCDDCCGGRGRGACYGPQCLCR or LCLPCFTTDHQLARACDDCCGGRGRGACYGPQCLCR or LCLPCFTT or DHQLARRCDDCCGGRGRGACYGPQCLCR or LCLPCFTTDHQLARKCDDCCGGKGRGRCYGPQCLCR or LCLPCFTTDHQLARACDDCCGGKGRGRCYGPQCLCR or LCLPCFTTDHQLARRCDDCCGGKGRGRCYGPQCLCR or LCLPCFTTDHQLARKCDDCCGGAGRGRCYGPQCLCR or LCLPCF or TTDHQLARACDDCCGGAGRGRCYGPQCLCR or LCLPCFTTDHQLARRCDDCCGGAGRGRCYGPQCLCR or LCLPCFTTDHQLARKCDDCCGGRGRGRCYGPQCLCR or LCLPCFTTDHQLARACDDCCGGRGRGRCYGPQCLCR or LCLPCFTTDHQLARRCDDCCGGRGRGRCYGPQCLCR or KCLP or CFTTDHQLARRCDDCCGGRGRGRCYGPQCLCR or LCLPCFTTDHQLARCDDCCGGGRGKCYGPQCLCR or LCLPCFTTDHQLARCDDCCGGGRGCYGPQCLCR or KCLPCFTTDHQLARCDDCCGGGRGCYGPQCLCR; note = CONT. FROM ABOVE: SCSPCFTTDHQSARKCDDCCGGKGRGKCYGPQCLCR or SCSPCFTTDH or QSARACDDCCGGKGRGKCYGPQCLCR or SCSPCFTTDHQSARRCDDCCGGKGRGKCYGPQCLCR or SCSPCFTTDHQSARKCDDCCGGAGRGKCYGPQCLCR or SCSPCFTTDHQSARACDDCCGGAGRGKCYGPQCLCR or SCSPCFTTDHQSARRCDDCCGGAGRGKCYGPQCLCR or SCSPCFTT or DHQSARKCDDCCGGRGRGKCYGPQCLCR or SCSPCFTTDHQSARACDDCCGGRGRGKCYGPQCLCR or SCSPCFTTDHQSARRCDDCCGGRGRGKCYGPQCLCR or SCSPCFTTDHQSARKCDDCCGGKGRGACYGPQCLCR or SCSPCFTTDHQSARACDDCCGGKGRGACYGPQCLCR or SCSPCF or TTDHQSARRCDDCCGGKGRGACYGPQCLCR or SCSPCFTTDHQSARKCDDCCGGAGRGACYGPQCLCR or SCSPCFTTDHQSARACDDCCGGAGRGACYGPQCLCR or SCSPCFTTDHQSARRCDDCCGGAGRGACYGPQCLCR or SCSPCFTTDHQSARKCDDCCGGRGRGACYGPQCLCR or SCSP or CFTTDHQSARACDDCCGGRGRGACYGPQCLCR or SCSPCFTTDHQSARRCDDCCGGRGRGACYGPQCLCR or SCSPCFTTDHQSARKCDDCCGGKGRGRCYGPQCLCR or SCSPCFTTDHQSARACDDCCGGKGRGRCYGPQCLCR or SCSPCFTTDHQSARRCDDCCGGKGRGRCYGPQCLCR or SC or SPCFTTDHQSARKCDDCCGGAGRGRCYGPQCLCR or SCSPCFTTDHQSARACDDCCGGAGRGRCYGPQCLCR or SCSPCFTTDHQSARRCDDCCGGAGRGRCYGPQCLCR; note = CONT. FROM ABOVE: SCSPCFTTDHQSARKCDDCCGGRGRGRCYGPQCLCR or SCSPCFTTDHQSARACDDCCGGRGRGRCYGPQCLCR or SCSPCFTTDHQSARRCDDCCGGRGRGRCYGPQCLCR or KCSPCFTTDHQSARRCDDCCGGRGRGRCYGPQCLCR or SCSPCFTTDHQSARCDDCCGGGRGKCYGPQCLCR or SCSPCFTTDHQSARCDDCCGGGRGCYGPQCLCR or KCSPCFTTDHQSARCDDCCGGGRGCYGPQCLCR or MCMPCF or TTDPNMARKCRDCCGGNGKCFGPQCLCNRG or MCMPCFTTDHNMAKKCRDCCGGNGKCFGYQCLCNRG or MCMPCFTTDHQTARRCRDCCGGRGRKCFGQCLCGYD or ACGPCFTTDPQMAEKCSDCCGGIGTCYGPQCLCNRL or MCMPCFTTRPNMAQQCRDCCRGRGKCFGPQCLCG or MCMPCF or TTRPNMAQQCRDCCRGRGKCFGPQCLCGYD or MCMPCFTTNLNMEQECRDCCGGTGRCFGPQCLCG or GCMPCFTTDRYMARKCKECCRGYGNCFGPQCLCNRG or GCGPCFTTDANMARKCRECCGGNGKCFGPQCLCNRE or GCGPCFTTDANMARKCRECCGGIGKCFGPQCLCNRI or MCMPCF or TTRPDMAQQCRACCKGRGKCFGPQCLCG or MCIPCFTTNPNMAAKCNACCGSRRGSCRGPQCIC or [sequence omitted] or CGPCFTTDPYTESKCATCCGGRGKCVGPQCLCNR or RCGPCFTTDPQTQAKCSECCGRKGGVCKGPQCICG or CGPCFTKDPETE or KKCATCCGGIGRCFGPQCLCNRG or MCMPCFTTDHQMARRCDDCCGGRGRGKCWGPQCLCR; note = CONT. FROM ABOVE: AMCMPCFTTDHNMAKKCRDCCGGNGKCFGPQCLCNRG or CGPCFTTDWESEKKCAECCGGIGRCFGPQCLCNRK or CGPCFTTDHQTEQKCAECCGGIGKCYGPQCLCRG or CGPCFTTDRQMEQ or KCAECCGGIGKCYGPQCLCRG or CGPCFTTDHQTEQKCAECCGGIGKCYGPQCLC or CMPCFTTDHQMARKCDDCCGGRGKCYGPQCLCRG or RCGPCFTTDPQTQAKCSECCGRKGGVCKGPQCICGIQ or RCPPCFTTNPNMEADCRKCCGGRGYCASYQCICPG or CGPCFTTDHNMARKCDECC or GGKGRGKCFGPQCLCR or VCMPCFTTDQQMARKCSDCCGGKGRGKCYGPQCLCR or MCGPCFTTDANMARKCRECCGGIGKCFGPQCLCNRI or MCGPCFTTDANMAAACRECCGGIGKCFGPQCLCNRI or MCGPCFTTDANMARKCAECCGGIGKCFGPQCLCNRI or MCGPCFTTDANMARKCRE or CCGGIGACFGPQCLCNRI or MCGPCFTTDANMARKCRECCGGIGKCFGPQCLCNAI or CMPCFTTRPNMAQQCRDCCRGRGKCFGPQCLCGYD or MCMPCFTTNLNMEQECRDCCGGTGRCFGPQCLCGYD or CMPCFTTRPNMAQQCRDCCRGRGKCFGPQCLCGYD or GSEISCEPGKTFKDKCNT or CRCGADGKSAACTLKACPNQ or GSSCEPGRTFRDRCNTCRCGADGRSAACTLRACPNQ or GSSCEPGRTFRDRCNTCKCGADGRSAACTLRACPNQ or GSSCEPGTTFRDRCNTCRCGSDGRSAACTLRACPQ or GSSCTPGTTFRDRCNTCRCSSNGRSAACTLRACPPGSY or GSSCTPGTTFRNR or CNTCRCGSNGRSASCTLMACPPGSY; note = CONT. FROM ABOVE: GSSCTPGATFRNRCNTCRCGSNGRSASCTLMACPPGSY or GSSCQPGTTYQRGCNTCRCLEDGQTEACTLRLC or GSSCTPGATYREGCNICRCRSDGRSGACTRRICPVDSN or GSSCQPGTTFRRDCNTCVCNRDGTNAACTLRACL or EISCEPGKTF or KDKCNTCRCGADGKSAACTLKACPNQ or SCEPGRTFRDRCNTCRCGADGRSAACTLRACPNQ or SCEPGRTFRDRCNTCKCGADGRSAACTLRACPNQ or SCEPGTTFRDRCNTCRCGSDGRSAACTLRACPQ or SCTPGTTFRDRCNTCRCSSNGRSAACTLRACPPGSY or SCTPGTTFRNRCNTC or RCGSNGRSASCTLMACPPGSY or SCTPGATFRNRCNTCRCGSNGRSASCTLMACPPGSY or SCQPGTTYQRGCNTCRCLEDGQTEACTLRLC or SCTPGATYREGCNICRCRSDGRSGACTRRICPVDSN or SCQPGTTFRRDCNTCVCNRDGTNAACTLRACL or GSMCMPCFTTDHQMARKCDDCCGGKGRGKCYGPQCLCR or GSACMPCFTTDHQMARKCDDCCGGKGRGKCYGPQCLCR or GSMCAPCFTTDHQMARKCDDCCGGKGRGKCYGPQCLCR or GSMCMACFTTDHQMARKCDDCCGGKGRGKCYGPQCLCR or GSMCMPCATTDHQMARKCDDCCGGKGRGKC or YGPQCLCR or GSMCMPCFATDHQMARKCDDCCGGKGRGKCYGPQCLCR or GSMCMPCFTADHQMARKCDDCCGGKGRGKCYGPQCLCR or GSMCMPCFTTAHQMARKCDDCCGGKGRGKCYGPQCLCR or GSMCMPCFTTDAQMARKCDDCCGGKGRGKCYGPQCLCR or GSMCMPCFTTDHAMARK or CDDCCGGKGRGKCYGPQCLCR; note = CONT. FROM ABOVE: GSMCMPCFTTDHQAARKCDDCCGGKGRGKCYGPQCLCR or GSMCMPCFTTDHQMAAKCDDCCGGKGRGKCYGPQCLCR or GSMCMPCFTTDHQMARACDDCCGGKGRGKCYGPQCLCR or GSMCMPCFTTDHQMARKCADCCGGKGRGKCYGPQCLCR or GSMC or MPCFTTDHQMARKCDACCGGKGRGKCYGPQCLCR or GSMCMPCFTTDHQMARKCDDCCAGKGRGKCYGPQCLCR or GSMCMPCFTTDHQMARKCDDCCGAKGRGKCYGPQCLCR or GSMCMPCFTTDHQMARKCDDCCGGAGRGKCYGPQCLCR or GSMCMPCFTTDHQMARKCDDCCGGKARGKCYGPQC or LCR or GSMCMPCFTTDHQMARKCDDCCGGKGAGKCYGPQCLCR or GSMCMPCFTTDHQMARKCDDCCGGKGRGACYGPQCLCR or GSMCMPCFTTDHQMARKCDDCCGGKGRGKCAGPQCLCR or GSMCMPCFTTDHQMARKCDDCCGGKGRGKCYAPQCLCR or GSMCMPCFTTDHQMARKCDDCC or GGKGRGKCYGAQCLCR or GSMCMPCFTTDHQMARKCDDCCGGKGRGKCYGPACLCR or GSMCMPCFTTDHQMARKCDDCCGGKGRGKCYGPQCACR or GSMCMPCFTTDHQMARKCDDCCGGKGRGKCYGPQCLCA or MCMPCFTTDHQMARKCDDCCGGKGRGKCYGPQCLCR or ACMPCFTTDHQ or MARKCDDCCGGKGRGKCYGPQCLCR or MCAPCFTTDHQMARKCDDCCGGKGRGKCYGPQCLCR or MCMACFTTDHQMARKCDDCCGGKGRGKCYGPQCLCR or MCMPCATTDHQMARKCDDCCGGKGRGKCYGPQCLCR or MCMPCFATDHQMARKCDDCCGGKGRGKCYGPQCLCR or MCMPCFTA; note = CONT. FROM ABOVE: DHQMARKCDDCCGGKGRGKCYGPQCLCR or MCMPCFTTAHQMARKCDDCCGGKGRGKCYGPQCLCR or MCMPCFTTDAQMARKCDDCCGGKGRGKCYGPQCLCR or MCMPCFTTDHAMARKCDDCCGGKGRGKCYGPQCLCR or MCMPCFTTDHQAARKCDDCCGGKGRGKCYGPQCLCR or MCMPC or FTTDHQMAAKCDDCCGGKGRGKCYGPQCLCR or MCMPCFTTDHQMARACDDCCGGKGRGKCYGPQCLCR or MCMPCFTTDHQMARKCADCCGGKGRGKCYGPQCLCR or MCMPCFTTDHQMARKCDACCGGKGRGKCYGPQCLCR or MCMPCFTTDHQMARKCDDCCAGKGRGKCYGPQCLCR or MC or MPCFTTDHQMARKCDDCCGAKGRGKCYGPQCLCR or MCMPCFTTDHQMARKCDDCCGGAGRGKCYGPQCLCR or MCMPCFTTDHQMARKCDDCCGGKARGKCYGPQCLCR or MCMPCFTTDHQMARKCDDCCGGKGAGKCYGPQCLCR or MCMPCFTTDHQMARKCDDCCGGKGRGACYGPQCLCR or MCMPCFTTDHQMARKCDDCCGGKGRGKCAGPQCLCR or MCMPCFTTDHQMARKCDDCCGGKGRGKCYAPQCLCR or MCMPCFTTDHQMARKCDDCCGGKGRGKCYGAQCLCR or MCMPCFTTDHQMARKCDDCCGGKGRGKCYGPACLCR or MCMPCFTTDHQMARKCDDCCGGKGRGKCYGPQCACR or MCMPCFTTDHQMARKCDDCCGGKGRGKCYGPQCLCA
  REGION 1..322: note = See specification as filed for detailed description of substitutions and preferred embodiments
METDTLLLWVLLLWVPGSTGXXXXXXXXXXXXXXXXXXXXXXXXXXXXXXXXXXXXXXXXXXXXXXXXXXXXXXXXXXXXXXXXXXXXXGGSGGSDKTHTCPPCPAPELLGGPSVFLFPPKPKDTLMISRTPEVTCVVVDVSHEDPEVKFNWYVDGVEVHNAKTKPREEQYNSTYRVVSVLTVLHQDWLNGKEYKCKVSNKALPAPIEKTISKAKGQPREPQVYTLPPSRDELTKNQVSLTCLVKGFYPSDIAVEWESNGQPENNYKTTPPVLDSDGSFFLYSKLTVDKSRWQQGNVFSCSVMHEALHNHYTQKSLSLSPGK

SEQ ID NO: 1231 - protein, 20 aa, synthetic construct
  REGION 1..20: note = Description of Artificial Sequence: Synthetic peptide
METDTLLLWVLLLWVPGSTG

SEQ ID NO: 1232 - protein, 30 aa, synthetic construct
  REGION 1..30: note = Description of Artificial Sequence: Synthetic polypeptide
MAPRRARGCRTLGLPALLLLLLLRPPATRG

SEQ ID NO: 1233 - protein, 338 aa, synthetic construct; identical to SEQ ID NO: 1173
  REGION 1..338: note = Description of Artificial Sequence: Synthetic polypeptide
  VARIANT 253..302: note = MOD_RES - Any amino acid or absent

SEQ ID NO: 1234 - protein, 345 aa, synthetic construct; identical to SEQ ID NO: 1174
  REGION 1..345: note = Description of Artificial Sequence: Synthetic polypeptide
  VARIANT 260..309: note = MOD_RES - Any amino acid or absent

SEQ ID NO: 1235 - RNA, 12 nt, synthetic construct
  misc_feature 1..12: note = Description of Artificial Sequence: Synthetic oligonucleotide
  source 1..12: mol_type = other RNA
accagacaagag

SEQ ID NO: 1236 - RNA, 12 nt, synthetic construct
  misc_feature 1..12: note = Description of Artificial Sequence: Synthetic oligonucleotide
  source 1..12: mol_type = other RNA
ctcttgtttggt

SEQ ID NO: 1237 - RNA, 15 nt, synthetic construct
  misc_feature 1..15: note = Description of Artificial Sequence: Synthetic oligonucleotide
  source 1..15: mol_type = other RNA
gagcagaaacaaggc

SEQ ID NO: 1238 - RNA, 15 nt, synthetic construct
  misc_feature 1..15: note = Description of Artificial Sequence: Synthetic oligonucleotide
  source 1..15: mol_type = other RNA
ctcgtctttgttccg

SEQ ID NO: 1239 - RNA, 26 nt, synthetic construct
  misc_feature 1..26: note = Description of Artificial Sequence: Synthetic oligonucleotide
  source 1..26: mol_type = other RNA
gggacgctgacccagaagatctacta

SEQ ID NO: 1240 - RNA, 26 nt, synthetic construct
  misc_feature 1..26: note = Description of Artificial Sequence: Synthetic oligonucleotide
  source 1..26: mol_type = other RNA
ccctgcgactgggtcttctagatgat

SEQ ID NO: 1241 - RNA, 18 nt, synthetic construct
  misc_feature 1..18: note = Description of Artificial Sequence: Synthetic oligonucleotide
  source 1..18: mol_type = other RNA
ggcatgcgacctctgttt

SEQ ID NO: 1242 - RNA, 18 nt, synthetic construct
  misc_feature 1..18: note = Description of Artificial Sequence: Synthetic oligonucleotide
  source 1..18: mol_type = other RNA
ccgtacgctggagacaaa

SEQ ID NO: 1243 - protein, 38 aa, synthetic construct
  REGION 1..38: note = Description of Artificial Sequence: Synthetic polypeptide
GSEISCEPGKTFKDKCNTCRCGADGKSAACTLKACPNQ

SEQ ID NO: 1244 - protein, 36 aa, synthetic construct
  REGION 1..36: note = Description of Artificial Sequence: Synthetic polypeptide
GSSCEPGRTFRDRCNTCRCGADGRSAACTLRACPNQ

SEQ ID NO: 1245 - protein, 36 aa, synthetic construct
  REGION 1..36: note = Description of Artificial Sequence: Synthetic polypeptide
GSSCEPGRTFRDRCNTCKCGADGRSAACTLRACPNQ

SEQ ID NO: 1246 - protein, 35 aa, synthetic construct
  REGION 1..35: note = Description of Artificial Sequence: Synthetic polypeptide
GSSCEPGTTFRDRCNTCRCGSDGRSAACTLRACPQ

SEQ ID NO: 1247 - protein, 38 aa, synthetic construct
  REGION 1..38: note = Description of Artificial Sequence: Synthetic polypeptide
GSSCTPGTTFRDRCNTCRCSSNGRSAACTLRACPPGSY

SEQ ID NO: 1248 - protein, 38 aa, synthetic construct
  REGION 1..38: note = Description of Artificial Sequence: Synthetic polypeptide
GSSCTPGTTFRNRCNTCRCGSNGRSASCTLMACPPGSY

SEQ ID NO: 1249 - protein, 38 aa, synthetic construct
  REGION 1..38: note = Description of Artificial Sequence: Synthetic polypeptide
GSSCTPGATFRNRCNTCRCGSNGRSASCTLMACPPGSY

SEQ ID NO: 1250 - protein, 33 aa, synthetic construct
  REGION 1..33: note = Description of Artificial Sequence: Synthetic polypeptide
GSSCQPGTTYQRGCNTCRCLEDGQTEACTLRLC

SEQ ID NO: 1251 - protein, 38 aa, synthetic construct
  REGION 1..38: note = Description of Artificial Sequence: Synthetic polypeptide
GSSCTPGATYREGCNICRCRSDGRSGACTRRICPVDSN

SEQ ID NO: 1252 - protein, 34 aa, synthetic construct
  REGION 1..34: note = Description of Artificial Sequence: Synthetic polypeptide
GSSCQPGTTFRRDCNTCVCNRDGTNAACTLRACL

SEQ ID NO: 1253 - protein, 36 aa, synthetic construct
  REGION 1..36: note = Description of Artificial Sequence: Synthetic polypeptide
EISCEPGKTFKDKCNTCRCGADGKSAACTLKACPNQ

SEQ ID NO: 1254 - protein, 34 aa, synthetic construct
  REGION 1..34: note = Description of Artificial Sequence: Synthetic polypeptide
SCEPGRTFRDRCNTCRCGADGRSAACTLRACPNQ

SEQ ID NO: 1255 - protein, 34 aa, synthetic construct
  REGION 1..34: note = Description of Artificial Sequence: Synthetic polypeptide
SCEPGRTFRDRCNTCKCGADGRSAACTLRACPNQ

SEQ ID NO: 1256 - protein, 33 aa, synthetic construct
  REGION 1..33: note = Description of Artificial Sequence: Synthetic polypeptide
SCEPGTTFRDRCNTCRCGSDGRSAACTLRACPQ

SEQ ID NO: 1257 - protein, 36 aa, synthetic construct
  REGION 1..36: note = Description of Artificial Sequence: Synthetic polypeptide
SCTPGTTFRDRCNTCRCSSNGRSAACTLRACPPGSY

SEQ ID NO: 1258 - protein, 36 aa, synthetic construct
  REGION 1..36: note = Description of Artificial Sequence: Synthetic polypeptide
SCTPGTTFRNRCNTCRCGSNGRSASCTLMACPPGSY

SEQ ID NO: 1259 - protein, 36 aa, synthetic construct
  REGION 1..36: note = Description of Artificial Sequence: Synthetic polypeptide
SCTPGATFRNRCNTCRCGSNGRSASCTLMACPPGSY

SEQ ID NO: 1260 - protein, 31 aa, synthetic construct
  REGION 1..31: note = Description of Artificial Sequence: Synthetic polypeptide
SCQPGTTYQRGCNTCRCLEDGQTEACTLRLC

SEQ ID NO: 1261 - protein, 36 aa, synthetic construct
  REGION 1..36: note = Description of Artificial Sequence: Synthetic polypeptide
SCTPGATYREGCNICRCRSDGRSGACTRRICPVDSN

SEQ ID NO: 1262 - protein, 32 aa, synthetic construct
  REGION 1..32: note = Description of Artificial Sequence: Synthetic polypeptide
SCQPGTTFRRDCNTCVCNRDGTNAACTLRACL

SEQ ID NO: 1263 - protein, 38 aa, synthetic construct; identical to SEQ ID NO: 1
  REGION 1..38: note = Description of Artificial Sequence: Synthetic polypeptide

SEQ ID NO: 1264 - protein, 38 aa, synthetic construct
  REGION 1..38: note = Description of Artificial Sequence: Synthetic polypeptide
GSACMPCFTTDHQMARKCDDCCGGKGRGKCYGPQCLCR

SEQ ID NO: 1265 - protein, 38 aa, synthetic construct
  REGION 1..38: note = Description of Artificial Sequence: Synthetic polypeptide
GSMCAPCFTTDHQMARKCDDCCGGKGRGKCYGPQCLCR

SEQ ID NO: 1266 - protein, 38 aa, synthetic construct
  REGION 1..38: note = Description of Artificial Sequence: Synthetic polypeptide
GSMCMACFTTDHQMARKCDDCCGGKGRGKCYGPQCLCR

SEQ ID NO: 1267 - protein, 38 aa, synthetic construct
  REGION 1..38: note = Description of Artificial Sequence: Synthetic polypeptide
GSMCMPCATTDHQMARKCDDCCGGKGRGKCYGPQCLCR

SEQ ID NO: 1268 - protein, 38 aa, synthetic construct
  REGION 1..38: note = Description of Artificial Sequence: Synthetic polypeptide
GSMCMPCFATDHQMARKCDDCCGGKGRGKCYGPQCLCR

SEQ ID NO: 1269 - protein, 38 aa, synthetic construct
  REGION 1..38: note = Description of Artificial Sequence: Synthetic polypeptide
GSMCMPCFTADHQMARKCDDCCGGKGRGKCYGPQCLCR

SEQ ID NO: 1270 - protein, 38 aa, synthetic construct
  REGION 1..38: note = Description of Artificial Sequence: Synthetic polypeptide
GSMCMPCFTTAHQMARKCDDCCGGKGRGKCYGPQCLCR

SEQ ID NO: 1271 - protein, 38 aa, synthetic construct
  REGION 1..38: note = Description of Artificial Sequence: Synthetic polypeptide
GSMCMPCFTTDAQMARKCDDCCGGKGRGKCYGPQCLCR

SEQ ID NO: 1272 - protein, 38 aa, synthetic construct
  REGION 1..38: note = Description of Artificial Sequence: Synthetic polypeptide
GSMCMPCFTTDHAMARKCDDCCGGKGRGKCYGPQCLCR

SEQ ID NO: 1273 - protein, 38 aa, synthetic construct
  REGION 1..38: note = Description of Artificial Sequence: Synthetic polypeptide
GSMCMPCFTTDHQAARKCDDCCGGKGRGKCYGPQCLCR

SEQ ID NO: 1274 - protein, 38 aa, synthetic construct
  REGION 1..38: note = Description of Artificial Sequence: Synthetic polypeptide
GSMCMPCFTTDHQMAAKCDDCCGGKGRGKCYGPQCLCR

SEQ ID NO: 1275 - protein, 38 aa, synthetic construct; identical to SEQ ID NO: 113
  REGION 1..38: note = Description of Artificial Sequence: Synthetic polypeptide

SEQ ID NO: 1276 - protein, 38 aa, synthetic construct
  REGION 1..38: note = Description of Artificial Sequence: Synthetic polypeptide
GSMCMPCFTTDHQMARKCADCCGGKGRGKCYGPQCLCR

SEQ ID NO: 1277 - protein, 38 aa, synthetic construct
  REGION 1..38: note = Description of Artificial Sequence: Synthetic polypeptide
GSMCMPCFTTDHQMARKCDACCGGKGRGKCYGPQCLCR

SEQ ID NO: 1278 - protein, 38 aa, synthetic construct
  REGION 1..38: note = Description of Artificial Sequence: Synthetic polypeptide
GSMCMPCFTTDHQMARKCDDCCAGKGRGKCYGPQCLCR

SEQ ID NO: 1279 - protein, 38 aa, synthetic construct
  REGION 1..38: note = Description of Artificial Sequence: Synthetic polypeptide
GSMCMPCFTTDHQMARKCDDCCGAKGRGKCYGPQCLCR

SEQ ID NO: 1280 - protein, 38 aa, synthetic construct; identical to SEQ ID NO: 115
  REGION 1..38: note = Description of Artificial Sequence: Synthetic polypeptide

SEQ ID NO: 1281 - protein, 38 aa, synthetic construct
  REGION 1..38: note = Description of Artificial Sequence: Synthetic polypeptide
GSMCMPCFTTDHQMARKCDDCCGGKARGKCYGPQCLCR

SEQ ID NO: 1282 - protein, 38 aa, synthetic construct
  REGION 1..38: note = Description of Artificial Sequence: Synthetic polypeptide
GSMCMPCFTTDHQMARKCDDCCGGKGAGKCYGPQCLCR

SEQ ID NO: 1283 - protein, 38 aa, synthetic construct; identical to SEQ ID NO: 120
  REGION 1..38: note = Description of Artificial Sequence: Synthetic polypeptide

SEQ ID NO: 1284 - protein, 38 aa, synthetic construct
  REGION 1..38: note = Description of Artificial Sequence: Synthetic polypeptide
GSMCMPCFTTDHQMARKCDDCCGGKGRGKCAGPQCLCR

SEQ ID NO: 1285 - protein, 38 aa, synthetic construct
  REGION 1..38: note = Description of Artificial Sequence: Synthetic polypeptide
GSMCMPCFTTDHQMARKCDDCCGGKGRGKCYAPQCLCR

SEQ ID NO: 1286 - protein, 38 aa, synthetic construct
  REGION 1..38: note = Description of Artificial Sequence: Synthetic polypeptide
GSMCMPCFTTDHQMARKCDDCCGGKGRGKCYGAQCLCR

SEQ ID NO: 1287 - protein, 38 aa, synthetic construct
  REGION 1..38: note = Description of Artificial Sequence: Synthetic polypeptide
GSMCMPCFTTDHQMARKCDDCCGGKGRGKCYGPACLCR

SEQ ID NO: 1288 - protein, 38 aa, synthetic construct
  REGION 1..38: note = Description of Artificial Sequence: Synthetic polypeptide
GSMCMPCFTTDHQMARKCDDCCGGKGRGKCYGPQCACR

SEQ ID NO: 1289 - protein, 38 aa, synthetic construct
  REGION 1..38: note = Description of Artificial Sequence: Synthetic polypeptide
GSMCMPCFTTDHQMARKCDDCCGGKGRGKCYGPQCLCA

SEQ ID NO: 1290 - protein, 36 aa, synthetic construct; identical to SEQ ID NO: 568
  REGION 1..36: note = Description of Artificial Sequence: Synthetic polypeptide

SEQ ID NO: 1291 - protein, 36 aa, synthetic construct
  REGION 1..36: note = Description of Artificial Sequence: Synthetic polypeptide
ACMPCFTTDHQMARKCDDCCGGKGRGKCYGPQCLCR

SEQ ID NO: 1292 - protein, 36 aa, synthetic construct
  REGION 1..36: note = Description of Artificial Sequence: Synthetic polypeptide
MCAPCFTTDHQMARKCDDCCGGKGRGKCYGPQCLCR

SEQ ID NO: 1293 - protein, 36 aa, synthetic construct
  REGION 1..36: note = Description of Artificial Sequence: Synthetic polypeptide
MCMACFTTDHQMARKCDDCCGGKGRGKCYGPQCLCR

SEQ ID NO: 1294 - protein, 36 aa, synthetic construct
  REGION 1..36: note = Description of Artificial Sequence: Synthetic polypeptide
MCMPCATTDHQMARKCDDCCGGKGRGKCYGPQCLCR

SEQ ID NO: 1295 - protein, 36 aa, synthetic construct
  REGION 1..36: note = Description of Artificial Sequence: Synthetic polypeptide
MCMPCFATDHQMARKCDDCCGGKGRGKCYGPQCLCR

SEQ ID NO: 1296 - protein, 36 aa, synthetic construct
  REGION 1..36: note = Description of Artificial Sequence: Synthetic polypeptide
MCMPCFTADHQMARKCDDCCGGKGRGKCYGPQCLCR

SEQ ID NO: 1297 - protein, 36 aa, synthetic construct
  REGION 1..36: note = Description of Artificial Sequence: Synthetic polypeptide
MCMPCFTTAHQMARKCDDCCGGKGRGKCYGPQCLCR

SEQ ID NO: 1298 - protein, 36 aa, synthetic construct
  REGION 1..36: note = Description of Artificial Sequence: Synthetic polypeptide
MCMPCFTTDAQMARKCDDCCGGKGRGKCYGPQCLCR

SEQ ID NO: 1299 - protein, 36 aa, synthetic construct
  REGION 1..36: note = Description of Artificial Sequence: Synthetic polypeptide
MCMPCFTTDHAMARKCDDCCGGKGRGKCYGPQCLCR

SEQ ID NO: 1300 - protein, 36 aa, synthetic construct
  REGION 1..36: note = Description of Artificial Sequence: Synthetic polypeptide
MCMPCFTTDHQAARKCDDCCGGKGRGKCYGPQCLCR

SEQ ID NO: 1301 - protein, 36 aa, synthetic construct
  REGION 1..36: note = Description of Artificial Sequence: Synthetic polypeptide
MCMPCFTTDHQMAAKCDDCCGGKGRGKCYGPQCLCR

SEQ ID NO: 1302 - protein, 36 aa, synthetic construct; identical to SEQ ID NO: 680
  REGION 1..36: note = Description of Artificial Sequence: Synthetic polypeptide

SEQ ID NO: 1303 - protein, 36 aa, synthetic construct
  REGION 1..36: note = Description of Artificial Sequence: Synthetic polypeptide
MCMPCFTTDHQMARKCADCCGGKGRGKCYGPQCLCR

SEQ ID NO: 1304 - protein, 36 aa, synthetic construct
  REGION 1..36: note = Description of Artificial Sequence: Synthetic polypeptide
MCMPCFTTDHQMARKCDACCGGKGRGKCYGPQCLCR

SEQ ID NO: 1305 - protein, 36 aa, synthetic construct
  REGION 1..36: note = Description of Artificial Sequence: Synthetic polypeptide
MCMPCFTTDHQMARKCDDCCAGKGRGKCYGPQCLCR

SEQ ID NO: 1306 - protein, 36 aa, synthetic construct
  REGION 1..36: note = Description of Artificial Sequence: Synthetic polypeptide
MCMPCFTTDHQMARKCDDCCGAKGRGKCYGPQCLCR

SEQ ID NO: 1307 - protein, 36 aa, synthetic construct; identical to SEQ ID NO: 682
  REGION 1..36: note = Description of Artificial Sequence: Synthetic polypeptide

SEQ ID NO: 1308 - protein, 36 aa, synthetic construct
  REGION 1..36: note = Description of Artificial Sequence: Synthetic polypeptide
MCMPCFTTDHQMARKCDDCCGGKARGKCYGPQCLCR

SEQ ID NO: 1309 - protein, 36 aa, synthetic construct
  REGION 1..36: note = Description of Artificial Sequence: Synthetic polypeptide
MCMPCFTTDHQMARKCDDCCGGKGAGKCYGPQCLCR

SEQ ID NO: 1310 - protein, 36 aa, synthetic construct; identical to SEQ ID NO: 687
  REGION 1..36: note = Description of Artificial Sequence: Synthetic polypeptide

SEQ ID NO: 1311 - protein, 36 aa, synthetic construct
  REGION 1..36: note = Description of Artificial Sequence: Synthetic polypeptide
MCMPCFTTDHQMARKCDDCCGGKGRGKCAGPQCLCR

SEQ ID NO: 1312 - protein, 36 aa, synthetic construct
  REGION 1..36: note = Description of Artificial Sequence: Synthetic polypeptide
MCMPCFTTDHQMARKCDDCCGGKGRGKCYAPQCLCR

SEQ ID NO: 1313 - protein, 36 aa, synthetic construct
  REGION 1..36: note = Description of Artificial Sequence: Synthetic polypeptide
MCMPCFTTDHQMARKCDDCCGGKGRGKCYGAQCLCR

SEQ ID NO: 1314 - protein, 36 aa, synthetic construct
  REGION 1..36: note = Description of Artificial Sequence: Synthetic polypeptide
MCMPCFTTDHQMARKCDDCCGGKGRGKCYGPACLCR

SEQ ID NO: 1315 - protein, 36 aa, synthetic construct
  REGION 1..36: note = Description of Artificial Sequence: Synthetic polypeptide
MCMPCFTTDHQMARKCDDCCGGKGRGKCYGPQCACR

SEQ ID NO: 1316 - protein, 36 aa, synthetic construct
  REGION 1..36: note = Description of Artificial Sequence: Synthetic polypeptide
MCMPCFTTDHQMARKCDDCCGGKGRGKCYGPQCLCA

SEQ ID NO: 1317 - protein, 279 aa, synthetic construct
  REGION 1..279: note = Description of Artificial Sequence: Synthetic polypeptide
HHHHHHHHHHITCPPPMSVEHADIWVKSYSLYSRERYICNSGFKRKAGTSSLTECVLNKATNVAHWTTPSLKCIRDPALVHQRPAPPSGGSGGGGSGGGSGGGGSLQNWVNVISDLKKIEDLIQSMHIDATLYTESDVHPSCKVTAMKCFLLELQVISLESGDASIHDTVENLIILANNSLSSNGNVTESGCKECEELEEKNIKEFLQSFVHIVQMFINTSGGGGSGGGGSVAGGGGSGGGGSMCMPCFTTDHQMARKCDDCCGGKGRGKCYGPQCLCR

SEQ ID NO: 1318 - protein, 285 aa, synthetic construct
  REGION 1..285: note = Description of Artificial Sequence: Synthetic polypeptide
HHHHHHHHHHNWVNVISDLKKIEDLIQSMHIDATLYTESDVHPSCKVTAMKCFLLELQVISLESGDASIHDTVENLIILANNSLSSNGNVTESGCKECEELEEKNIKEFLQSFVHIVQMFINTSSGGGSGGGGSGGGGSGGGGSGGGSLQITCPPPMSVEHADIWVKSYSLYSRERYICNSGFKRKAGTSSLTECVLNKATNVAHWTTPSLKCIRDPALVHQRPAPPGGGGSGGGGSVAGGGGSGGGGSMCMPCFTTDHQMARKCDDCCGGKGRGKCYGPQCLCR

SEQ ID NO: 1319 - protein, 283 aa, synthetic construct
  REGION 1..283: note = Description of Artificial Sequence: Synthetic polypeptide
HHHHHHHHHHITCPPPMSVEHADIWVKSYSLYSRERYICNSGFKRKAGTSSLTECVLNKATNVAHWTTPSLKCIRDPALVHQRPAPPSGGSGGGGSGGGSGGGGSLQNWVNVISDLKKIEDLIQSMHIDATLYTESDVHPSCKVTAMKCFLLELQVISLESGDASIHDTVENLIILANNSLSSNGNVTESGCKECEELEEKNIKEFLQSFVHIVQMFINTSAEAAAKEAAAKAVAAEAAAKEAAAKAMCMPCFTTDHQMARKCDDCCGGKGRGKCYGPQCLCR

SEQ ID NO: 1320 - protein, 279 aa, synthetic construct
  REGION 1..279: note = Description of Artificial Sequence: Synthetic polypeptide
MCMPCFTTDHQMARKCDDCCGGKGRGKCYGPQCLCRGGGGSGGGGSVAGGGGSGGGGSITCPPPMSVEHADIWVKSYSLYSRERYICNSGFKRKAGTSSLTECVLNKATNVAHWTTPSLKCIRDPALVHQRPAPPSGGSGGGGSGGGSGGGGSLQNWVNVISDLKKIEDLIQSMHIDATLYTESDVHPSCKVTAMKCFLLELQVISLESGDASIHDTVENLIILANNSLSSNGNVTESGCKECEELEEKNIKEFLQSFVHIVQMFINTSHHHHHHHHHH

SEQ ID NO: 1321 - protein, 272 aa, synthetic construct
  REGION 1..272: note = Description of Artificial Sequence: Synthetic polypeptide
HHHHHHHHHHITCPPPMSVEHADIWVKSYSLYSRERYICNSGFKRKAGTSSLTECVLNKATNVAHWTTPSLKCIRDPALVHQRPAPPSGGSGGGGSGGGSGGGGSLQNWVNVISDLKKIEDLIQSMHIDATLYTESDVHPSCKVTAMKCFLLELQVISLESGDASIHDTVENLIILANNSLSSNGNVTESGCKECEELEEKNIKEFLQSFVHIVQMFINTSGGGGSGGGGSGGGGSMCMPCFTTDHQMARKCDDCCGGKGRGKCYGPQCLCR

SEQ ID NO: 1322 - protein, 281 aa, synthetic construct
  REGION 1..281: note = Description of Artificial Sequence: Synthetic polypeptide
DYKDDDDKIEGRITCPPPMSVEHADIWVKSYSLYSRERYICNSGFKRKAGTSSLTECVLNKATNVAHWTTPSLKCIRDPALVHQRPAPPSGGSGGGGSGGGSGGGGSLQNWVNVISDLKKIEDLIQSMHIDATLYTESDVHPSCKVTAMKCFLLELQVISLESGDASIHDTVENLIILANNSLSSNGNVTESGCKECEELEEKNIKEFLQSFVHIVQMFINTSGGGGSGGGGSVAGGGGSGGGGSMCMPCFTTDHQMARKCDDCCGGKGRGKCYGPQCLCR

SEQ ID NO: 1323 - protein, 283 aa, synthetic construct
  REGION 1..283: note = Description of Artificial Sequence: Synthetic polypeptide
HHHHHHHHHHITCPPPMSVEHADIWVKSYSLYSRERYICNSGFKRKAGTSSLTECVLNKATNVAHWTTPSLKCIRDPALVHQRPAPPSGGSGGGGSGGGSGGGGSLQNWVNVISDLKKIEDLIQSMHIDATLYTESDVHPSCKVTAMKCFLLELQVISLESGDASIHDTVENLIILANNSLSSNGNVTESGCKECEELEEKNIKEFLQSFVHIVQMFINTSGGGGSGGGGSPLGLAGGGGGSGGGGSMCMPCFTTDHQMARKCDDCCGGKGRGKCYGPQCLCR

SEQ ID NO: 1324 - protein, 278 aa, synthetic construct
  REGION 1..278: note = Description of Artificial Sequence: Synthetic polypeptide
HHHHHHHHHHNWVNVISDLKKIEDLIQSMHIDATLYTESDVHPSCKVTAMKCFLLELQVISLESGDASIHDTVENLIILANNSLSSNGNVTESGCKECEELEEKNIKEFLQSFVHIVQMFINTSSGGGSGGGGSGGGGSGGGGSGGGSLQITCPPPMSVEHADIWVKSYSLYSRERYICNSGFKRKAGTSSLTECVLNKATNVAHWTTPSLKCIRDPALVHQRPAPPGGGGSGGGGSGGGGSMCMPCFTTDHQMARKCDDCCGGKGRGKCYGPQCLCR

SEQ ID NO: 1325 - protein, 274 aa, synthetic construct
  REGION 1..274: note = Description of Artificial Sequence: Synthetic polypeptide
HHHHHHHHHHITCPPPMSVEHADIWVKSYSLYSRERYICNSGFKRKAGTSSLTECVLNKATNVAHWTTPSLKCIRDPALVHQRPAPPSGGSGGGGSGGGSGGGGSLQNWVNVISDLKKIEDLIQSMHIDATLYTESDVHPSCKVTAMKCFLLELQVISLESGDASIHDTVENLIILANNSLSSNGNVTESGCKECEELEEKNIKEFLQSFVHIVQMFINTSAEAAAKEAAAKEAAAKAMCMPCFTTDHQMARKCDDCCGGKGRGKCYGPQCLCR

SEQ ID NO: 1326 - protein, 272 aa, synthetic construct
  REGION 1..272: note = Description of Artificial Sequence: Synthetic polypeptide
HHHHHHHHHHMCMPCFTTDHQMARKCDDCCGGKGRGKCYGPQCLCRGGGGSGGGGSGGGGSITCPPPMSVEHADIWVKSYSLYSRERYICNSGFKRKAGTSSLTECVLNKATNVAHWTTPSLKCIRDPALVHQRPAPPSGGSGGGGSGGGSGGGGSLQNWVNVISDLKKIEDLIQSMHIDATLYTESDVHPSCKVTAMKCFLLELQVISLESGDASIHDTVENLIILANNSLSSNGNVTESGCKECEELEEKNIKEFLQSFVHIVQMFINTS

SEQ ID NO: 1327 - protein, 289 aa, synthetic construct
  REGION 1..289: note = Description of Artificial Sequence: Synthetic polypeptide
HHHHHHHHHHNWVNVISDLKKIEDLIQSMHIDATLYTESDVHPSCKVTAMKCFLLELQVISLESGDASIHDTVENLIILANNSLSSNGNVTESGCKECEELEEKNIKEFLQSFVHIVQMFINTSSGGGSGGGGSGGGGSGGGGSGGGSLQITCPPPMSVEHADIWVKSYSLYSRERYICNSGFKRKAGTSSLTECVLNKATNVAHWTTPSLKCIRDPALVHQRPAPPGGGGSGGGGSPLGLAGGGGGSGGGGSMCMPCFTTDHQMARKCDDCCGGKGRGKCYGPQCLCR

SEQ ID NO: 1328 - protein, 263 aa, synthetic construct
  REGION 1..263: note = Description of Artificial Sequence: Synthetic polypeptide
HHHHHHHHHHITCPPPMSVEHADIWVKSYSLYSRERYICNSGFKRKAGTSSLTECVLNKATNVAHWTTPSLKCIRDPALVHQRPAPPSGGSGGGGSGGGSGGGGSLQNWVNVISDLKKIEDLIQSMHIDATLYTESDVHPSCKVTAMKCFLLELQVISLESGDASIHDTVENLIILANNSLSSNGNVTESGCKECEELEEKNIKEFLQSFVHIVQMFINTSGSVAGSMCMPCFTTDHQMARRCDDCCGGRGRGKCYGPQCLCR

SEQ ID NO: 1329 - protein, 275 aa, synthetic construct
  REGION 1..275: note = Description of Artificial Sequence: Synthetic polypeptide
MCMPCFTTDHQMARRCDDCCGGRGRGKCYGPQCLCRGGGGSVAGGGGSNWVNVISDLKKIEDLIQSMHIDATLYTESDVHPSCKVTAMKCFLLELQVISLESGDASIHDTVENLIILANNSLSSNGNVTESGCKECEELEEKNIKEFLQSFVHIVQMFINTSSGGGSGGGGSGGGGSGGGGSGGGSLQITCPPPMSVEHADIWVKSYSLYSRERYICNSGFKRKAGTSSLTECVLNKATNVAHWTTPSLKCIRDPALVHQRPAPPHHHHHHHHHH

SEQ ID NO: 1330 - protein, 269 aa, synthetic construct
  REGION 1..269: note = Description of Artificial Sequence: Synthetic polypeptide
ITCPPPMSVEHADIWVKSYSLYSRERYICNSGFKRKAGTSSLTECVLNKATNVAHWTTPSLKCIRDPALVHQRPAPPSGGSGGGGSGGGSGGGGSLQNWVNVISDLKKIEDLIQSMHIDATLYTESDVHPSCKVTAMKCFLLELQVISLESGDASIHDTVENLIILANNSLSSNGNVTESGCKECEELEEKNIKEFLQSFVHIVQMFINTSGGGGSGGGGSVAGGGGSGGGGSMCMPCFTTDHQMARKCDDCCGGKGRGKCYGPQCLCR

SEQ ID NO: 1331 - protein, 275 aa, synthetic construct
  REGION 1..275: note = Description of Artificial Sequence: Synthetic polypeptide
NWVNVISDLKKIEDLIQSMHIDATLYTESDVHPSCKVTAMKCFLLELQVISLESGDASIHDTVENLIILANNSLSSNGNVTESGCKECEELEEKNIKEFLQSFVHIVQMFINTSSGGGSGGGGSGGGGSGGGGSGGGSLQITCPPPMSVEHADIWVKSYSLYSRERYICNSGFKRKAGTSSLTECVLNKATNVAHWTTPSLKCIRDPALVHQRPAPPGGGGSGGGGSVAGGGGSGGGGSMCMPCFTTDHQMARKCDDCCGGKGRGKCYGPQCLCR

SEQ ID NO: 1332 - protein, 273 aa, synthetic construct
  REGION 1..273: note = Description of Artificial Sequence: Synthetic polypeptide
ITCPPPMSVEHADIWVKSYSLYSRERYICNSGFKRKAGTSSLTECVLNKATNVAHWTTPSLKCIRDPALVHQRPAPPSGGSGGGGSGGGSGGGGSLQNWVNVISDLKKIEDLIQSMHIDATLYTESDVHPSCKVTAMKCFLLELQVISLESGDASIHDTVENLIILANNSLSSNGNVTESGCKECEELEEKNIKEFLQSFVHIVQMFINTSAEAAAKEAAAKAVAAEAAAKEAAAKAMCMPCFTTDHQMARKCDDCCGGKGRGKCYGPQCLCR

SEQ ID NO: 1333 - protein, 269 aa, synthetic construct
  REGION 1..269: note = Description of Artificial Sequence: Synthetic polypeptide
MCMPCFTTDHQMARKCDDCCGGKGRGKCYGPQCLCRGGGGSGGGGSVAGGGGSGGGGSITCPPPMSVEHADIWVKSYSLYSRERYICNSGFKRKAGTSSLTECVLNKATNVAHWTTPSLKCIRDPALVHQRPAPPSGGSGGGGSGGGSGGGGSLQNWVNVISDLKKIEDLIQSMHIDATLYTESDVHPSCKVTAMKCFLLELQVISLESGDASIHDTVENLIILANNSLSSNGNVTESGCKECEELEEKNIKEFLQSFVHIVQMFINTS

SEQ ID NO: 1334 - protein, 262 aa, synthetic construct
  REGION 1..262: note = Description of Artificial Sequence: Synthetic polypeptide
ITCPPPMSVEHADIWVKSYSLYSRERYICNSGFKRKAGTSSLTECVLNKATNVAHWTTPSLKCIRDPALVHQRPAPPSGGSGGGGSGGGSGGGGSLQNWVNVISDLKKIEDLIQSMHIDATLYTESDVHPSCKVTAMKCFLLELQVISLESGDASIHDTVENLIILANNSLSSNGNVTESGCKECEELEEKNIKEFLQSFVHIVQMFINTSGGGGSGGGGSGGGGSMCMPCFTTDHQMARKCDDCCGGKGRGKCYGPQCLCR

SEQ ID NO: 1335 - protein, 273 aa, synthetic construct
  REGION 1..273: note = Description of Artificial Sequence: Synthetic polypeptide
ITCPPPMSVEHADIWVKSYSLYSRERYICNSGFKRKAGTSSLTECVLNKATNVAHWTTPSLKCIRDPALVHQRPAPPSGGSGGGGSGGGSGGGGSLQNWVNVISDLKKIEDLIQSMHIDATLYTESDVHPSCKVTAMKCFLLELQVISLESGDASIHDTVENLIILANNSLSSNGNVTESGCKECEELEEKNIKEFLQSFVHIVQMFINTSGGGGSGGGGSPLGLAGGGGGSGGGGSMCMPCFTTDHQMARKCDDCCGGKGRGKCYGPQCLCR

SEQ ID NO: 1336 - protein, 268 aa, synthetic construct
  REGION 1..268: note = Description of Artificial Sequence: Synthetic polypeptide
NWVNVISDLKKIEDLIQSMHIDATLYTESDVHPSCKVTAMKCFLLELQVISLESGDASIHDTVENLIILANNSLSSNGNVTESGCKECEELEEKNIKEFLQSFVHIVQMFINTSSGGGSGGGGSGGGGSGGGGSGGGSLQITCPPPMSVEHADIWVKSYSLYSRERYICNSGFKRKAGTSSLTECVLNKATNVAHWTTPSLKCIRDPALVHQRPAPPGGGGSGGGGSGGGGSMCMPCFTTDHQMARKCDDCCGGKGRGKCYGPQCLCR

SEQ ID NO: 1337 - protein, 264 aa, synthetic construct
  REGION 1..264: note = Description of Artificial Sequence: Synthetic polypeptide
ITCPPPMSVEHADIWVKSYSLYSRERYICNSGFKRKAGTSSLTECVLNKATNVAHWTTPSLKCIRDPALVHQRPAPPSGGSGGGGSGGGSGGGGSLQNWVNVISDLKKIEDLIQSMHIDATLYTESDVHPSCKVTAMKCFLLELQVISLESGDASIHDTVENLIILANNSLSSNGNVTESGCKECEELEEKNIKEFLQSFVHIVQMFINTSAEAAAKEAAAKEAAAKAMCMPCFTTDHQMARKCDDCCGGKGRGKCYGPQCLCR

SEQ ID NO: 1338 - protein, 262 aa, synthetic construct
  REGION 1..262: note = Description of Artificial Sequence: Synthetic polypeptide
MCMPCFTTDHQMARKCDDCCGGKGRGKCYGPQCLCRGGGGSGGGGSGGGGSITCPPPMSVEHADIWVKSYSLYSRERYICNSGFKRKAGTSSLTECVLNKATNVAHWTTPSLKCIRDPALVHQRPAPPSGGSGGGGSGGGSGGGGSLQNWVNVISDLKKIEDLIQSMHIDATLYTESDVHPSCKVTAMKCFLLELQVISLESGDASIHDTVENLIILANNSLSSNGNVTESGCKECEELEEKNIKEFLQSFVHIVQMFINTS

SEQ ID NO: 1339 - protein, 279 aa, synthetic construct
  REGION 1..279: note = Description of Artificial Sequence: Synthetic polypeptide
NWVNVISDLKKIEDLIQSMHIDATLYTESDVHPSCKVTAMKCFLLELQVISLESGDASIHDTVENLIILANNSLSSNGNVTESGCKECEELEEKNIKEFLQSFVHIVQMFINTSSGGGSGGGGSGGGGSGGGGSGGGSLQITCPPPMSVEHADIWVKSYSLYSRERYICNSGFKRKAGTSSLTECVLNKATNVAHWTTPSLKCIRDPALVHQRPAPPGGGGSGGGGSPLGLAGGGGGSGGGGSMCMPCFTTDHQMARKCDDCCGGKGRGKCYGPQCLCR

SEQ ID NO: 1340 - protein, 253 aa, synthetic construct
  REGION 1..253: note = Description of Artificial Sequence: Synthetic polypeptide
ITCPPPMSVEHADIWVKSYSLYSRERYICNSGFKRKAGTSSLTECVLNKATNVAHWTTPSLKCIRDPALVHQRPAPPSGGSGGGGSGGGSGGGGSLQNWVNVISDLKKIEDLIQSMHIDATLYTESDVHPSCKVTAMKCFLLELQVISLESGDASIHDTVENLIILANNSLSSNGNVTESGCKECEELEEKNIKEFLQSFVHIVQMFINTSGSVAGSMCMPCFTTDHQMARRCDDCCGGRGRGKCYGPQCLCR

SEQ ID NO: 1341 - protein, 265 aa, synthetic construct
  REGION 1..265: note = Description of Artificial Sequence: Synthetic polypeptide
MCMPCFTTDHQMARRCDDCCGGRGRGKCYGPQCLCRGGGGSVAGGGGSNWVNVISDLKKIEDLIQSMHIDATLYTESDVHPSCKVTAMKCFLLELQVISLESGDASIHDTVENLIILANNSLSSNGNVTESGCKECEELEEKNIKEFLQSFVHIVQMFINTSSGGGSGGGGSGGGGSGGGGSGGGSLQITCPPPMSVEHADIWVKSYSLYSRERYICNSGFKRKAGTSSLTECVLNKATNVAHWTTPSLKCIRDPALVHQRPAPP

SEQ ID NO: 1342 - protein, 221 aa, synthetic construct
  REGION 1..221: note = Description of Artificial Sequence: Synthetic polypeptide
HHHHHHHHHHITCPPPMSVEHADIWVKSYSLYSRERYICNSGFKRKAGTSSLTECVLNKATNVAHWTTPSLKCIRDPALVHQRPAPPSGGSGGGGSGGGSGGGGSLQNWVNVISDLKKIEDLIQSMHIDATLYTESDVHPSCKVTAMKCFLLELQVISLESGDASIHDTVENLIILANNSLSSNGNVTESGCKECEELEEKNIKEFLQSFVHIVQMFINTS

SEQ ID NO: 1343 - protein, 268 aa, synthetic construct
  REGION 1..268: note = Description of Artificial Sequence: Synthetic polypeptide
ITCPPPMSVEHADIWVKSYSLYSRERYICNSGFKRKAGTSSLTECVLNKATNVAHWTTPSLKCIRDPALVHQRPAPPGGSGGGGSGGGSGGGGSLQNWVNVISDLKKIEDLIQSMHIDATLYTESDVHPSCKVTAMKCFLLELQVISLESGDASIHDTVENLIILANNSLSSNGNVTESGCKECEELEEKNIKEFLQSFVHIVQMFINTSGGGGSGGGGSVAGGGGSGGGGSMCMPCFTTDHQMARKCDDCCGGKGRGKCYGPQCLCR

SEQ ID NO: 1344 - protein, 269 aa, synthetic construct
  REGION 1..269: note = Description of Artificial Sequence: Synthetic polypeptide
ITCPPPMSVEHADIWVKSYSLYSRERYICNSGFKRKAGTSSLTECVLNKATNVAHWTTPSLKCIRDPALVHQRPAPPGGGSGGGGSGGGSGGGGSLQNWVNVISDLKKIEDLIQSMHIDATLYTESDVHPSCKVTAMKCFLLELQVISLESGDASIHDTVENLIILANNSLSSNGNVTESGCKECEELEEKNIKEFLQSFVHIVQMFINTSGGGGSGGGGSVAGGGGSGGGGSMCMPCFTTDHQMARKCDDCCGGKGRGKCYGPQCLCR

SEQ ID NO: 1345 - protein, 269 aa, synthetic construct
  REGION 1..269: note = Description of Artificial Sequence: Synthetic polypeptide
ITCPPPMSVEHADIWVKSYSLYSRERYICNSGFKRKAGTSSLTECVLNKATNVAHWTTPSLKCIRDPALVHQRPAPPSGGSGGGGSGGGSGGGGSLQNWVNVISDLKKIEDLIQSMHIDATLYTESDVHPSCKVTAMKCFLLELQVISLESGDASIHDTVENLIILANNSLSSNGNVTESGCKECEELEEKNIKEFLQSFVHIVQMFINTSGGGGSGGGGSVAGGGGSGGGGSMCMPCFTTDHQMARACDDCCGGAGRGKCYGPQCLCR

SEQ ID NO: 1346 - protein, 269 aa, synthetic construct
  REGION 1..269: note = Description of Artificial Sequence: Synthetic polypeptide
ITCPPPMSVEHADIWVKSYSLYSRERYICNSGFKRKAGTSSLTECVLNKATNVAHWTTPSLKCIRDPALVHQRPAPPSGGSGGGGSGGGSGGGGSLQNWVNVISDLKKIEDLIQSMHIDATLYTESDVHPSCKVTAMKCFLLELQVISLESGDASIHDTVENLIILANNSLSSNGNVTESGCKECEELEEKNIKEFLQSFVHIVQMFINTSGGGGSGGGGSVAGGGGSGGGGSMCMPCFTTDHQMARRCDDCCGGRGRGKCYGPQCLCR

SEQ ID NO: 1347 - protein, 265 aa, synthetic construct
  REGION 1..265: note = Description of Artificial Sequence: Synthetic polypeptide
MCMPCFTTDHQMARKCDDCCGGKGRGKCYGPQCLCRGGGGSVAGGGGSNWVNVISDLKKIEDLIQSMHIDATLYTESDVHPSCKVTAMKCFLLELQVISLESGDASIHDTVENLIILANNSLSSNGNVTESGCKECEELEEKNIKEFLQSFVHIVQMFINTSSGGGSGGGGSGGGGSGGGGSGGGSLQITCPPPMSVEHADIWVKSYSLYSRERYICNSGFKRKAGTSSLTECVLNKATNVAHWTTPSLKCIRDPALVHQRPAPP

SEQ ID NO: 1348 - protein, 265 aa, synthetic construct
  REGION 1..265: note = Description of Artificial Sequence: Synthetic polypeptide
MCMPCFTTDHQMARACDDCCGGAGRGKCYGPQCLCRGGGGSVAGGGGSNWVNVISDLKKIEDLIQSMHIDATLYTESDVHPSCKVTAMKCFLLELQVISLESGDASIHDTVENLIILANNSLSSNGNVTESGCKECEELEEKNIKEFLQSFVHIVQMFINTSSGGGSGGGGSGGGGSGGGGSGGGSLQITCPPPMSVEHADIWVKSYSLYSRERYICNSGFKRKAGTSSLTECVLNKATNVAHWTTPSLKCIRDPALVHQRPAPP

SEQ ID NO: 1349 - protein, 297 aa, synthetic construct
  REGION 1..297: note = Description of Artificial Sequence: Synthetic polypeptide
  VARIANT 212..261: note = MOD_RES - Any amino acid or absent
ITCPPPMSVEHADIWVKSYSLYSRERYICNSGFKRKAGTSSLTECVLNKATNVAHWTTPSLKCIRDPALVHQRPAPPSGGSGGGGSGGGSGGGGSLQNWVNVISDLKKIEDLIQSMHIDATLYTESDVHPSCKVTAMKCFLLELQVISLESGDASIHDTVENLIILANNSLSSNGNVTESGCKECEELEEKNIKEFLQSFVHIVQMFINTSXXXXXXXXXXXXXXXXXXXXXXXXXXXXXXXXXXXXXXXXXXXXXXXXXXMCMPCFTTDHQMARKCDDCCGGKGRGKCYGPQCLCR

SEQ ID NO: 1350 - protein, 303 aa, synthetic construct
  REGION 1..303: note = Description of Artificial Sequence: Synthetic polypeptide
  VARIANT 218..267: note = MOD_RES - Any amino acid or absent
NWVNVISDLKKIEDLIQSMHIDATLYTESDVHPSCKVTAMKCFLLELQVISLESGDASIHDTVENLIILANNSLSSNGNVTESGCKECEELEEKNIKEFLQSFVHIVQMFINTSSGGGSGGGGSGGGGSGGGGSGGGSLQITCPPPMSVEHADIWVKSYSLYSRERYICNSGFKRKAGTSSLTECVLNKATNVAHWTTPSLKCIRDPALVHQRPAPPXXXXXXXXXXXXXXXXXXXXXXXXXXXXXXXXXXXXXXXXXXXXXXXXXXMCMPCFTTDHQMARKCDDCCGGKGRGKCYGPQCLCR

SEQ ID NO: 1351 - protein, 275 aa, synthetic construct
  REGION 1..275: note = Description of Artificial Sequence: Synthetic polypeptide
  VARIANT 212..239: note = MOD_RES - Any amino acid or absent
ITCPPPMSVEHADIWVKSYSLYSRERYICNSGFKRKAGTSSLTECVLNKATNVAHWTTPSLKCIRDPALVHQRPAPPSGGSGGGGSGGGSGGGGSLQNWVNVISDLKKIEDLIQSMHIDATLYTESDVHPSCKVTAMKCFLLELQVISLESGDASIHDTVENLIILANNSLSSNGNVTESGCKECEELEEKNIKEFLQSFVHIVQMFINTSXXXXXXXXXXXXXXXXXXXXXXXXXXXXMCMPCFTTDHQMARKCDDCCGGKGRGKCYGPQCLCR

SEQ ID NO: 1352 - protein, 283 aa, synthetic construct
  REGION 1..283: note = Description of Artificial Sequence: Synthetic polypeptide
  VARIANT 218..247: note = MOD_RES - Any amino acid or absent
NWVNVISDLKKIEDLIQSMHIDATLYTESDVHPSCKVTAMKCFLLELQVISLESGDASIHDTVENLIILANNSLSSNGNVTESGCKECEELEEKNIKEFLQSFVHIVQMFINTSSGGGSGGGGSGGGGSGGGGSGGGSLQITCPPPMSVEHADIWVKSYSLYSRERYICNSGFKRKAGTSSLTECVLNKATNVAHWTTPSLKCIRDPALVHQRPAPPXXXXXXXXXXXXXXXXXXXXXXXXXXXXXXMCMPCFTTDHQMARKCDDCCGGKGRGKCYGPQCLCR

SEQ ID NO: 1353 - protein, 297 aa, synthetic construct
  REGION 1..297: note = Description of Artificial Sequence: Synthetic polypeptide
  VARIANT 212..261: note = MOD_RES - Any amino acid or absent
ITCPPPMSVEHADIWVKSYSLYSRERYICNSGFKRKAGTSSLTECVLNKATNVAHWTTPSLKCIRDPALVHQRPAPPSGGSGGGGSGGGSGGGGSLQNWVNVISDLKKIEDLIQSMHIDATLYTESDVHPSCKVTAMKCFLLELQVISLESGDASIHDTVENLIILANNSLSSNGNVTESGCKECEELEEKNIKEFLQSFVHIVQMFINTSXXXXXXXXXXXXXXXXXXXXXXXXXXXXXXXXXXXXXXXXXXXXXXXXXXMCMPCFTTDHQMARACDDCCGGAGRGKCYGPQCLCR

SEQ ID NO: 1354 - protein, 303 aa, synthetic construct
  REGION 1..303: note = Description of Artificial Sequence: Synthetic polypeptide
  VARIANT 218..267: note = MOD_RES - Any amino acid or absent
NWVNVISDLKKIEDLIQSMHIDATLYTESDVHPSCKVTAMKCFLLELQVISLESGDASIHDTVENLIILANNSLSSNGNVTESGCKECEELEEKNIKEFLQSFVHIVQMFINTSSGGGSGGGGSGGGGSGGGGSGGGSLQITCPPPMSVEHADIWVKSYSLYSRERYICNSGFKRKAGTSSLTECVLNKATNVAHWTTPSLKCIRDPALVHQRPAPPXXXXXXXXXXXXXXXXXXXXXXXXXXXXXXXXXXXXXXXXXXXXXXXXXXMCMPCFTTDHQMARACDDCCGGAGRGKCYGPQCLCR

SEQ ID NO: 1355 - protein, 297 aa, synthetic construct
  REGION 1..297: note = Description of Artificial Sequence: Synthetic polypeptide
  VARIANT 212..261: note = MOD_RES - Any amino acid or absent
ITCPPPMSVEHADIWVKSYSLYSRERYICNSGFKRKAGTSSLTECVLNKATNVAHWTTPSLKCIRDPALVHQRPAPPSGGSGGGGSGGGSGGGGSLQNWVNVISDLKKIEDLIQSMHIDATLYTESDVHPSCKVTAMKCFLLELQVISLESGDASIHDTVENLIILANNSLSSNGNVTESGCKECEELEEKNIKEFLQSFVHIVQMFINTSXXXXXXXXXXXXXXXXXXXXXXXXXXXXXXXXXXXXXXXXXXXXXXXXXXMCMPCFTTDHQMARRCDDCCGGRGRGKCYGPQCLCR

SEQ ID NO: 1356 - protein, 303 aa, synthetic construct
  REGION 1..303: note = Description of Artificial Sequence: Synthetic polypeptide
  VARIANT 218..267: note = MOD_RES - Any amino acid or absent
NWVNVISDLKKIEDLIQSMHIDATLYTESDVHPSCKVTAMKCFLLELQVISLESGDASIHDTVENLIILANNSLSSNGNVTESGCKECEELEEKNIKEFLQSFVHIVQMFINTSSGGGSGGGGSGGGGSGGGGSGGGSLQITCPPPMSVEHADIWVKSYSLYSRERYICNSGFKRKAGTSSLTECVLNKATNVAHWTTPSLKCIRDPALVHQRPAPPXXXXXXXXXXXXXXXXXXXXXXXXXXXXXXXXXXXXXXXXXXXXXXXXXXMCMPCFTTDHQMARRCDDCCGGRGRGKCYGPQCLCR

SEQ ID NO: 1357 - protein, 327 aa, synthetic construct
  REGION 1..327: note = Description of Artificial Sequence: Synthetic polypeptide
  VARIANT 78..127: note = MOD_RES - Any amino acid or absent
  VARIANT 242..291: note = MOD_RES - Any amino acid or absent
ITCPPPMSVEHADIWVKSYSLYSRERYICNSGFKRKAGTSSLTECVLNKATNVAHWTTPSLKCIRDPALVHQRPAPPXXXXXXXXXXXXXXXXXXXXXXXXXXXXXXXXXXXXXXXXXXXXXXXXXXNWVNVISDLKKIEDLIQSMHIDATLYTESDVHPSCKVTAMKCFLLELQVISLESGDASIHDTVENLIILANNSLSSNGNVTESGCKECEELEEKNIKEFLQSFVHIVQMFINTSXXXXXXXXXXXXXXXXXXXXXXXXXXXXXXXXXXXXXXXXXXXXXXXXXXMCMPCFTTDHQMARRCDDCCGGRGRGKCYGPQCLCR

SEQ ID NO: 1358 - protein, 327 aa, synthetic construct
  REGION 1..327: note = Description of Artificial Sequence: Synthetic polypeptide
  VARIANT 115..164: note = MOD_RES - Any amino acid or absent
  VARIANT 242..291: note = MOD_RES - Any amino acid or absent
NWVNVISDLKKIEDLIQSMHIDATLYTESDVHPSCKVTAMKCFLLELQVISLESGDASIHDTVENLIILANNSLSSNGNVTESGCKECEELEEKNIKEFLQSFVHIVQMFINTSXXXXXXXXXXXXXXXXXXXXXXXXXXXXXXXXXXXXXXXXXXXXXXXXXXITCPPPMSVEHADIWVKSYSLYSRERYICNSGFKRKAGTSSLTECVLNKATNVAHWTTPSLKCIRDPALVHQRPAPPXXXXXXXXXXXXXXXXXXXXXXXXXXXXXXXXXXXXXXXXXXXXXXXXXXMCMPCFTTDHQMARRCDDCCGGRGRGKCYGPQCLCR

SEQ ID NO: 1359 - protein, 15 aa, synthetic construct
  REGION 1..15: note = Description of Artificial Sequence: Synthetic peptide
GGGGSGGGGSGGGGS

SEQ ID NO: 1360 - protein, 6 aa, synthetic construct
  REGION 1..6: note = Description of Artificial Sequence: Synthetic peptide
GSVAGS

SEQ ID NO: 1361 - protein, 12 aa, synthetic construct
  REGION 1..12: note = Description of Artificial Sequence: Synthetic peptide
GGGGSVAGGGGS

SEQ ID NO: 1362 - protein, 22 aa, synthetic construct
  REGION 1..22: note = Description of Artificial Sequence: Synthetic peptide
GGGGSGGGGSVAGGGGSGGGGS

SEQ ID NO: 1363 - protein, 26 aa, synthetic construct
  REGION 1..26: note = Description of Artificial Sequence: Synthetic peptide
GGGGSGGGGSPLGLAGGGGGSGGGGS

SEQ ID NO: 1364 - protein, 17 aa, synthetic construct
  REGION 1..17: note = Description of Artificial Sequence: Synthetic peptide
AEAAAKEAAAKEAAAKA

SEQ ID NO: 1365 - protein, 26 aa, synthetic construct
  REGION 1..26: note = Description of Artificial Sequence: Synthetic peptide
AEAAAKEAAAKAVAAEAAAKEAAAKA

SEQ ID NO: 1366 - protein, 25 aa, synthetic construct
  REGION 1..25: note = Description of Artificial Sequence: Synthetic peptide
SGGSGGGGSGGGGSGGGGSGGGSLQ

SEQ ID NO: 1367 - protein, 20 aa, synthetic construct
  REGION 1..20: note = Description of Artificial Sequence: Synthetic peptide
METDTLLLWVLLLWVPGSTG

SEQ ID NO: 1368 - protein, 20 aa, synthetic construct
  REGION 1..20: note = Description of Artificial Sequence: Synthetic peptide
  VARIANT 1..20: note = MISC_FEATURE - This sequence may encompass 1-20 residues
HHHHHHHHHHHHHHHHHHHH

SEQ ID NO: 1369 - protein, 107 aa, Homo sapiens
QVSPMHCLDEEGDDSDGASGDSGSGLGDARELLREETGAALKPRLPAPPPVTTPPLAGGSSTEDSRSEEVEEQTTVASLGAQTLPGSDSVSTWDGSVRTPGGRVKEG

SEQ ID NO: 1370 - protein, 26 aa, Homo sapiens
AAAPDVKELLSRLEELENLVSSLREQ

SEQ ID NO: 1371 - RNA, 38 nt, synthetic construct
  misc_feature 1..38: note = Description of Artificial Sequence: Synthetic oligonucleotide
  source 1..38: mol_type = other RNA
gcatgcgacctctgtttgatcaaacagaggtcgcatgc

SEQ ID NO: 1372 - RNA, 40 nt, synthetic construct
  misc_feature 1..40: note = Description of Artificial Sequence: Synthetic oligonucleotide
  source 1..40: mol_type = other RNA
ggcatgcgacctctgtttgatcaaacagaggtcgcatgcc

SEQ ID NO: 1373 - RNA, 28 nt, synthetic construct
  misc_feature 1..28: note = Description of Artificial Sequence: Synthetic oligonucleotide
  source 1..28: mol_type = other RNA
ggcatgcgacctctgtttgatcagaggt

SEQ ID NO: 1374 - RNA, 29 nt, synthetic construct
  misc_feature 1..29: note = Description of Artificial Sequence: Synthetic oligonucleotide
  source 1..29: mol_type = other RNA
ggcatgcgacctctgtttgaggtcgcatg

SEQ ID NO: 1375 - RNA, 24 nt, synthetic construct
  misc_feature 1..24: note = Description of Artificial Sequence: Synthetic oligonucleotide
  source 1..24: mol_type = other RNA
ggacgtacgtttcgacgtacgtcc

SEQ ID NO: 1376 - RNA, 32 nt, synthetic construct
  misc_feature 1..32: note = Description of Artificial Sequence: Synthetic oligonucleotide
  source 1..32: mol_type = other RNA
ggatcgatcgatcgttcgcgatcgatcgatcc

SEQ ID NO: 1377 - RNA, 45 nt, synthetic construct
  misc_feature 1..45: note = Description of Artificial Sequence: Synthetic oligonucleotide
  source 1..45: mol_type = other RNA
aacacacacacacacacacactttgtgtgtgtgtgtgtgtgtgtt

SEQ ID NO: 1378 - RNA, 47 nt, synthetic construct
  misc_feature 1..47: note = Description of Artificial Sequence: Synthetic oligonucleotide
  source 1..47: mol_type = other RNA
aacacacacacacacacacactttaagtgtgtgtgtgtgtgtgtgtt

SEQ ID NO: 1379 - RNA, 52 nt, synthetic construct
  misc_feature 1..52: note = Description of Artificial Sequence: Synthetic oligonucleotide
  source 1..52: mol_type = other RNA
ggacgtacgtttcgcgactgtagattaatctacagtcgcgaaacgtacgtcc

SEQ ID NO: 1380 - RNA, 16 nt, synthetic construct
  misc_feature 1..16: note = Description of Artificial Sequence: Synthetic oligonucleotide
  source 1..16: mol_type = other RNA
ggatcgatcgatcgtt

SEQ ID NO: 1381 - RNA, 16 nt, synthetic construct
  misc_feature 1..16: note = Description of Artificial Sequence: Synthetic oligonucleotide
  source 1..16: mol_type = other RNA
cgcgatcgatcgatcc

SEQ ID NO: 1382 - protein, 12 aa, synthetic construct
  REGION 1..12: note = Description of Artificial Sequence: Synthetic peptide
  VARIANT 1..12: note = MISC_FEATURE - This sequence may encompass 6-12 residues
RRRRRRRRRRRR

SEQ ID NO: 1383 - protein, 14 aa, synthetic construct
  REGION 1..14: note = Description of Artificial Sequence: Synthetic peptide
CAYGRKKRRQRRRG

SEQ ID NO: 1384 - protein, 12 aa, synthetic construct
  REGION 1..12: note = Description of Artificial Sequence: Synthetic peptide
GVFVLGFLGFLA

SEQ ID NO: 1385 - protein, 8 aa, synthetic construct
  REGION 1..8: note = Description of Artificial Sequence: Synthetic peptide
RRRRRRRR

SEQ ID NO: 1386 - protein, 24 aa, synthetic construct
  REGION 1..24: note = Description of Artificial Sequence: Synthetic peptide
DSHAKRHHGYKRKFHEKHHSHRGY

SEQ ID NO: 1387 - protein, 14 aa, synthetic construct
  REGION 1..14: note = Description of Artificial Sequence: Synthetic peptide
KRLFKKLLFSLRKY

SEQ ID NO: 1388 - protein, 26 aa, synthetic construct
  REGION 1..26: note = Description of Artificial Sequence: Synthetic peptide
CIGAVLKVLTTGLPALISWIKRKRQQ

SEQ ID NO: 1389 - protein, 27 aa, synthetic construct
  REGION 1..27: note = Description of Artificial Sequence: Synthetic peptide
CLIKKALAALAKLNIKLLYGASNLTWG

SEQ ID NO: 1390 - protein, 14 aa, synthetic construct
  REGION 1..14: note = Description of Artificial Sequence: Synthetic peptide
YKQSHKKGGKKGSG

SEQ ID NO: 1391 - protein, 18 aa, synthetic construct
  REGION 1..18: note = Description of Artificial Sequence: Synthetic peptide
VRLPPPVRLPPPVRLPPP

SEQ ID NO: 1392 - protein, 14 aa, synthetic construct
  REGION 1..14: note = Description of Artificial Sequence: Synthetic peptide
VSRRRRRRGGRRRR

SEQ ID NO: 1393 - protein, 16 aa, synthetic construct
  REGION 1..16: note = Description of Artificial Sequence: Synthetic peptide
EARPALLTSRLRFIPK

SEQ ID NO: 1394 - protein, 6 aa, synthetic construct
  REGION 1..6: note = Description of Artificial Sequence: Synthetic peptide
KALLAL

SEQ ID NO: 1395 - protein, 11 aa, synthetic construct
  REGION 1..11: note = Description of Artificial Sequence: Synthetic peptide
YGRKKRRQRRR

SEQ ID NO: 1396 - protein, 9 aa, synthetic construct
  REGION 1..9: note = Description of Artificial Sequence: Synthetic peptide
RRRRRRRRR

SEQ ID NO: 1397 - protein, 21 aa, synthetic construct
  REGION 1..21: note = Description of Artificial Sequence: Synthetic peptide
AGYLLGKINLKALAALAKKIL

SEQ ID NO: 1398 - protein, 28 aa, synthetic construct
  REGION 1..28: note = Description of Artificial Sequence: Synthetic peptide
LSTAADMQGVVTDGMASGLDKDYLKPDD

SEQ ID NO: 1399 - protein, 17 aa, synthetic construct
  REGION 1..17: note = Description of Artificial Sequence: Synthetic peptide
CSIPPEVKFNKPFVYLI

SEQ ID NO: 1400 - protein, 15 aa, synthetic construct
  REGION 1..15: note = Description of Artificial Sequence: Synthetic peptide
SDLWEMMMVSLACQY

SEQ ID NO: 1401 - protein, 14 aa, synthetic construct
  REGION 1..14: note = Description of Artificial Sequence: Synthetic peptide
LLLFLLKKRKKRKY

SEQ ID NO: 1402 - protein, 14 aa, synthetic construct
  REGION 1..14: note = Description of Artificial Sequence: Synthetic peptide
SYFILRRRRKRFPY

SEQ ID NO: 1403 - protein, 14 aa, synthetic construct
  REGION 1..14: note = Description of Artificial Sequence: Synthetic peptide
SYYMLRKRRKRLPY

SEQ ID NO: 1404 - protein, 14 aa, synthetic construct
  REGION 1..14: note = Description of Artificial Sequence: Synthetic peptide
LYYFIRKKRKRVPY

SEQ ID NO: 1405 - protein, 26 aa, synthetic construct
  REGION 1..26: note = Description of Artificial Sequence: Synthetic peptide
FAGVVIGLAALGVATAAQVTAAVALV

SEQ ID NO: 1406 - protein, 26 aa, synthetic construct
  REGION 1..26: note = Description of Artificial Sequence: Synthetic peptide
FIGAIIGSVALGVATAAQITAASALI

SEQ ID NO: 1407 - protein, 26 aa, synthetic construct
  REGION 1..26: note = Description of Artificial Sequence: Synthetic peptide
FFGGVIGTIALGVATSAQIYAAVALV

SEQ ID NO: 1408 - protein, 26 aa, synthetic construct
  REGION 1..26: note = Description of Artificial Sequence: Synthetic peptide
FAGVVLAGAALGVATAAQITAGIALH

SEQ ID NO: 1409 - protein, 26 aa, synthetic construct
  REGION 1..26: note = Description of Artificial Sequence: Synthetic peptide
LAGVIMAGVAIGIATAAQITAGVALY

SEQ ID NO: 1410 - protein, 22 aa, synthetic construct
  REGION 1..22: note = Description of Artificial Sequence: Synthetic peptide
SFIEDLLFNKVTLADAGFMKQY

SEQ ID NO: 1411 - protein, 21 aa, synthetic construct
  REGION 1..21: note = Description of Artificial Sequence: Synthetic peptide
KQYGECLGDINARDLICAQKF

SEQ ID NO: 1412 - protein, 23 aa, synthetic construct
  REGION 1..23: note = Description of Artificial Sequence: Synthetic peptide
GLFGAIAGFIENGWEGMIDGWYG

SEQ ID NO: 1413 - protein, 24 aa, synthetic construct
  REGION 1..24: note = Description of Artificial Sequence: Synthetic peptide
GLFEAIEGFIENGWEGMIDGWYGC

SEQ ID NO: 1414 - protein, 24 aa, synthetic construct
  REGION 1..24: note = Description of Artificial Sequence: Synthetic peptide
GLFEAIEGFIENGWEGMIDGWYGC

SEQ ID NO: 1415 - protein, 4 aa, synthetic construct
  REGION 1..4: note = Description of Artificial Sequence: Synthetic peptide
GFFG

SEQ ID NO: 1416 - skipped

SEQ ID NO: 1417 - protein, 4 aa, synthetic construct
  REGION 1..4: note = Description of Artificial Sequence: Synthetic peptide
GFWG

SEQ ID NO: 1418 - protein, 5 aa, synthetic construct
  REGION 1..5: note = Description of Artificial Sequence: Synthetic peptide
GFWFG

SEQ ID NO: 1419 - protein, 4 aa, synthetic construct
  REGION 1..4: note = Description of Artificial Sequence: Synthetic peptide
GWWG

SEQ ID NO: 1420 - protein, 6 aa, synthetic construct
  REGION 1..6: note = Description of Artificial Sequence: Synthetic peptide
GWGGWG

SEQ ID NO: 1421 - protein, 5 aa, synthetic construct
  REGION 1..5: note = Description of Artificial Sequence: Synthetic peptide
GWWWG

SEQ ID NO: 1422 - protein, 7 aa, synthetic construct
  REGION 1..7: note = Description of Artificial Sequence: Synthetic peptide
FFLIPKG

SEQ ID NO: 1423 - protein, 7 aa, synthetic construct
  REGION 1..7: note = Description of Artificial Sequence: Synthetic peptide
GKPILFF

SEQ ID NO: 1424 - RNA, 19 nt, synthetic construct
  misc_feature 1..19: note = Description of Artificial Sequence: Synthetic oligonucleotide
  source 1..19: mol_type = other RNA
gcatgcgacctctgtttga

SEQ ID NO: 1425 - RNA, 19 nt, synthetic construct
  misc_feature 1..19: note = Description of Artificial Sequence: Synthetic oligonucleotide
  source 1..19: mol_type = other RNA
tcaaacagaggtcgcatgc

SEQ ID NO: 1426 - RNA, 24 nt, synthetic construct
  misc_feature 1..24: note = Description of Artificial Sequence: Synthetic oligonucleotide
  source 1..24: mol_type = other RNA
ggacgtacgtttcgcgactgtaga

SEQ ID NO: 1427 - RNA, 24 nt, synthetic construct
  misc_feature 1..24: note = Description of Artificial Sequence: Synthetic oligonucleotide
  source 1..24: mol_type = other RNA
tctacagtcgcgaaacgtacgtcc

SEQ ID NO: 1428 - protein, 269 aa, synthetic construct
  REGION 1..269: note = Description of Artificial Sequence: Synthetic polypeptide
ITCPPPMSVEHADIWVKSYSLYSRERYICNSGFKRKAGTSSLTECVLNKATNVAHWTTPSLKCIRDPALVHQRPAPPSGGSGGGGSGGGSGGGGSLQNWVNVISDLKKIEDLIQSMHIDATLYTESDVHPSCKVTAMKCFLLELQVISLESGDASIHDTVENLIILANNSLSSNGNVTESGCKECEELEEKNIKEFLQSFVHIVQMFINTSGGGGSGGGGSVAGGGGSGGGGSMCMPCFTTDHQMARRCDDCCGGRGRGRCYGPQCLCR

SEQ ID NO: 1429 - protein, 275 aa, synthetic construct
  REGION 1..275: note = Description of Artificial Sequence: Synthetic polypeptide
NWVNVISDLKKIEDLIQSMHIDATLYTESDVHPSCKVTAMKCFLLELQVISLESGDASIHDTVENLIILANNSLSSNGNVTESGCKECEELEEKNIKEFLQSFVHIVQMFINTSSGGGSGGGGSGGGGSGGGGSGGGSLQITCPPPMSVEHADIWVKSYSLYSRERYICNSGFKRKAGTSSLTECVLNKATNVAHWTTPSLKCIRDPALVHQRPAPPGGGGSGGGGSVAGGGGSGGGGSMCMPCFTTDHQMARRCDDCCGGRGRGRCYGPQCLCR

SEQ ID NO: 1430 - protein, 253 aa, synthetic construct
  REGION 1..253: note = Description of Artificial Sequence: Synthetic polypeptide
ITCPPPMSVEHADIWVKSYSLYSRERYICNSGFKRKAGTSSLTECVLNKATNVAHWTTPSLKCIRDPALVHQRPAPPSGGSGGGGSGGGSGGGGSLQNWVNVISDLKKIEDLIQSMHIDATLYTESDVHPSCKVTAMKCFLLELQVISLESGDASIHDTVENLIILANNSLSSNGNVTESGCKECEELEEKNIKEFLQSFVHIVQMFINTSGSVAGSMCMPCFTTDHQMARRCDDCCGGRGRGRCYGPQCLCR

SEQ ID NO: 1431 - protein, 265 aa, synthetic construct
  REGION 1..265: note = Description of Artificial Sequence: Synthetic polypeptide
MCMPCFTTDHQMARRCDDCCGGRGRGRCYGPQCLCRGGGGSVAGGGGSNWVNVISDLKKIEDLIQSMHIDATLYTESDVHPSCKVTAMKCFLLELQVISLESGDASIHDTVENLIILANNSLSSNGNVTESGCKECEELEEKNIKEFLQSFVHIVQMFINTSSGGGSGGGGSGGGGSGGGGSGGGSLQITCPPPMSVEHADIWVKSYSLYSRERYICNSGFKRKAGTSSLTECVLNKATNVAHWTTPSLKCIRDPALVHQRPAPP

SEQ ID NO: 1432 - protein, 309 aa, synthetic construct
  REGION 1..309: note = Description of Artificial Sequence: Synthetic polypeptide
ITCPPPMSVEHADIWVKSYSLYSRERYICNSGFKRKAGTSSLTECVLNKATNVAHWTTPSLKCIRDPALVHQRPAPPEPKSCDKTHTCPPCPAPELLGGPSVFLFPPKPKDTLMISRTPEVTCVVVDVSHEDPEVKFNWYVDGVEVHNAKTKPREEQYNSTYRVVSVLTVLHQDWLNGKEYKCKVSNKALPAPIEKTISKAKGQPREPQVYTLPPSRDELTKNQVSLTCLVKGFYPSDIAVEWESNGQPENNYKTTPPVLDSDGSFFLYSKLTVDKSRWQQGNVFSCSVMHEALHNHYTQKSLSLSPGK

SEQ ID NO: 1433 - protein, 407 aa, synthetic construct
  REGION 1..407: note = Description of Artificial Sequence: Synthetic polypeptide
ITCPPPMSVEHADIWVKSYSLYSRERYICNSGFKRKAGTSSLTECVLNKATNVAHWTTPSLKCIRDPALVHQRPAPPSTVTTAGVTPQPESLSPSGKEPAASSPSSNNTAATTAAIVPGSQLMPSKSPSTGTTEISSHESSHGTPSQTTAKNWELTASASHQPPGVYPQGHSDTTEPKSCDKTHTCPPCPAPELLGGPSVFLFPPKPKDTLMISRTPEVTCVVVDVSHEDPEVKFNWYVDGVEVHNAKTKPREEQYNSTYRVVSVLTVLHQDWLNGKEYKCKVSNKALPAPIEKTISKAKGQPREPQVYTLPPSRDELTKNQVSLTCLVKGFYPSDIAVEWESNGQPENNYKTTPPVLDSDGSFFLYSKLTVDKSRWQQGNVFSCSVMHEALHNHYTQKSLSLSPGK

SEQ ID NO: 1434 - protein, 348 aa, synthetic construct
  REGION 1..348: note = Description of Artificial Sequence: Synthetic polypeptide
ITCPPPMSVEHADIWVKSYSLYSRERYICNSGFKRKAGTSSLTECVLNKATNVAHWTTPSLKCIREPKSCDKTHTCPPCPAPELLGGPSVFLFPPKPKDTLMISRTPEVTCVVVDVSHEDPEVKFNWYVDGVEVHNAKTKPREEQYNSTYRVVSVLTVLHQDWLNGKEYKCKVSNKALPAPIEKTISKAKGQPREPQVYTLPPSRDELTKNQVSLTCLVKGFYPSDIAVEWESNGQPENNYKTTPPVLDSDGSFFLYSKLTVDKSRWQQGNVFSCSVMHEALHNHYTQKSLSLSPGKGGGGSGGGGSGGGGSMCMPCFTTDHQMARRCDDCCGGRGRGKCYGPQCLCR

SEQ ID NO: 1435 - protein, 355 aa, synthetic construct
  REGION 1..355: note = Description of Artificial Sequence: Synthetic polypeptide
ITCPPPMSVEHADIWVKSYSLYSRERYICNSGFKRKAGTSSLTECVLNKATNVAHWTTPSLKCIREPKSCDKTHTCPPCPAPELLGGPSVFLFPPKPKDTLMISRTPEVTCVVVDVSHEDPEVKFNWYVDGVEVHNAKTKPREEQYNSTYRVVSVLTVLHQDWLNGKEYKCKVSNKALPAPIEKTISKAKGQPREPQVYTLPPSRDELTKNQVSLTCLVKGFYPSDIAVEWESNGQPENNYKTTPPVLDSDGSFFLYSKLTVDKSRWQQGNVFSCSVMHEALHNHYTQKSLSLSPGKGGGGSGGGGSVAGGGGSGGGGSMCMPCFTTDHQMARRCDDCCGGRGRGKCYGPQCLCR

SEQ ID NO: 1436 - protein, 458 aa, synthetic construct
  REGION 1..458: note = Description of Artificial Sequence: Synthetic polypeptide
ITCPPPMSVEHADIWVKSYSLYSRERYICNSGFKRKAGTSSLTECVLNKATNVAHWTTPSLKCIRDPALVHQRPAPPSTVTTAGVTPQPESLSPSGKEPAASSPSSNNTAATTAAIVPGSQLMPSKSPSTGTTEISSHESSHGTPSQTTAKNWELTASASHQPPGVYPQGHSDTTEPKSCDKTHTCPPCPAPELLGGPSVFLFPPKPKDTLMISRTPEVTCVVVDVSHEDPEVKFNWYVDGVEVHNAKTKPREEQYNSTYRVVSVLTVLHQDWLNGKEYKCKVSNKALPAPIEKTISKAKGQPREPQVYTLPPSRDELTKNQVSLTCLVKGFYPSDIAVEWESNGQPENNYKTTPPVLDSDGSFFLYSKLTVDKSRWQQGNVFSCSVMHEALHNHYTQKSLSLSPGKGGGGSGGGGSGGGGSMCMPCFTTDHQMARRCDDCCGGRGRGKCYGPQCLCR

SEQ ID NO: 1437 - protein, 465 aa, synthetic construct
  REGION 1..465: note = Description of Artificial Sequence: Synthetic polypeptide
ITCPPPMSVEHADIWVKSYSLYSRERYICNSGFKRKAGTSSLTECVLNKATNVAHWTTPSLKCIRDPALVHQRPAPPSTVTTAGVTPQPESLSPSGKEPAASSPSSNNTAATTAAIVPGSQLMPSKSPSTGTTEISSHESSHGTPSQTTAKNWELTASASHQPPGVYPQGHSDTTEPKSCDKTHTCPPCPAPELLGGPSVFLFPPKPKDTLMISRTPEVTCVVVDVSHEDPEVKFNWYVDGVEVHNAKTKPREEQYNSTYRVVSVLTVLHQDWLNGKEYKCKVSNKALPAPIEKTISKAKGQPREPQVYTLPPSRDELTKNQVSLTCLVKGFYPSDIAVEWESNGQPENNYKTTPPVLDSDGSFFLYSKLTVDKSRWQQGNVFSCSVMHEALHNHYTQKSLSLSPGKGGGGSGGGGSVAGGGGSGGGGSMCMPCFTTDHQMARRCDDCCGGRGRGKCYGPQCLCR

SEQ ID NO: 1438 - protein, 348 aa, synthetic construct
  REGION 1..348: note = Description of Artificial Sequence: Synthetic polypeptide
MCMPCFTTDHQMARRCDDCCGGRGRGKCYGPQCLCRGGGGSGGGGSGGGGSITCPPPMSVEHADIWVKSYSLYSRERYICNSGFKRKAGTSSLTECVLNKATNVAHWTTPSLKCIREPKSCDKTHTCPPCPAPELLGGPSVFLFPPKPKDTLMISRTPEVTCVVVDVSHEDPEVKFNWYVDGVEVHNAKTKPREEQYNSTYRVVSVLTVLHQDWLNGKEYKCKVSNKALPAPIEKTISKAKGQPREPQVYTLPPSRDELTKNQVSLTCLVKGFYPSDIAVEWESNGQPENNYKTTPPVLDSDGSFFLYSKLTVDKSRWQQGNVFSCSVMHEALHNHYTQKSLSLSPGK

SEQ ID NO: 1439 - protein, 355 aa, synthetic construct
  REGION 1..355: note = Description of Artificial Sequence: Synthetic polypeptide
MCMPCFTTDHQMARRCDDCCGGRGRGKCYGPQCLCRGGGGSGGGGSVAGGGGSGGGGSITCPPPMSVEHADIWVKSYSLYSRERYICNSGFKRKAGTSSLTECVLNKATNVAHWTTPSLKCIREPKSCDKTHTCPPCPAPELLGGPSVFLFPPKPKDTLMISRTPEVTCVVVDVSHEDPEVKFNWYVDGVEVHNAKTKPREEQYNSTYRVVSVLTVLHQDWLNGKEYKCKVSNKALPAPIEKTISKAKGQPREPQVYTLPPSRDELTKNQVSLTCLVKGFYPSDIAVEWESNGQPENNYKTTPPVLDSDGSFFLYSKLTVDKSRWQQGNVFSCSVMHEALHNHYTQKSLSLSPGK

SEQ ID NO: 1440 - protein, 458 aa, synthetic construct
  REGION 1..458: note = Description of Artificial Sequence: Synthetic polypeptide
MCMPCFTTDHQMARRCDDCCGGRGRGKCYGPQCLCRGGGGSGGGGSGGGGSITCPPPMSVEHADIWVKSYSLYSRERYICNSGFKRKAGTSSLTECVLNKATNVAHWTTPSLKCIRDPALVHQRPAPPSTVTTAGVTPQPESLSPSGKEPAASSPSSNNTAATTAAIVPGSQLMPSKSPSTGTTEISSHESSHGTPSQTTAKNWELTASASHQPPGVYPQGHSDTTEPKSCDKTHTCPPCPAPELLGGPSVFLFPPKPKDTLMISRTPEVTCVVVDVSHEDPEVKFNWYVDGVEVHNAKTKPREEQYNSTYRVVSVLTVLHQDWLNGKEYKCKVSNKALPAPIEKTISKAKGQPREPQVYTLPPSRDELTKNQVSLTCLVKGFYPSDIAVEWESNGQPENNYKTTPPVLDSDGSFFLYSKLTVDKSRWQQGNVFSCSVMHEALHNHYTQKSLSLSPGK

SEQ ID NO: 1441 - protein, 465 aa, synthetic construct
  REGION 1..465: note = Description of Artificial Sequence: Synthetic polypeptide
MCMPCFTTDHQMARRCDDCCGGRGRGKCYGPQCLCRGGGGSGGGGSVAGGGGSGGGGSITCPPPMSVEHADIWVKSYSLYSRERYICNSGFKRKAGTSSLTECVLNKATNVAHWTTPSLKCIRDPALVHQRPAPPSTVTTAGVTPQPESLSPSGKEPAASSPSSNNTAATTAAIVPGSQLMPSKSPSTGTTEISSHESSHGTPSQTTAKNWELTASASHQPPGVYPQGHSDTTEPKSCDKTHTCPPCPAPELLGGPSVFLFPPKPKDTLMISRTPEVTCVVVDVSHEDPEVKFNWYVDGVEVHNAKTKPREEQYNSTYRVVSVLTVLHQDWLNGKEYKCKVSNKALPAPIEKTISKAKGQPREPQVYTLPPSRDELTKNQVSLTCLVKGFYPSDIAVEWESNGQPENNYKTTPPVLDSDGSFFLYSKLTVDKSRWQQGNVFSCSVMHEALHNHYTQKSLSLSPGK

SEQ ID NO: 1442 - protein, 18 aa, synthetic construct
  REGION 1..18: note = Description of Artificial Sequence: Synthetic peptide
CSSLDEPGRGGFSSESKV

SEQ ID NO: 1443 - protein, 22 aa, synthetic construct
  REGION 1..22: note = Description of Artificial Sequence: Synthetic peptide
KCFQWQRNMRKVRGPPVSCIKR

SEQ ID NO: 1444 - protein, 7 aa, synthetic construct
  REGION 1..7: note = Description of Artificial Sequence: Synthetic peptide
LCLRPVG

SEQ ID NO: 1445 - protein, 21 aa, synthetic construct
  REGION 1..21: note = Description of Artificial Sequence: Synthetic peptide
VTPHHVLVDEYTGEWVDSQFK

SEQ ID NO: 1446 - protein, 14 aa, synthetic construct
  REGION 1..14: note = Description of Artificial Sequence: Synthetic peptide
YKQSHKKGGKKGSG

SEQ ID NO: 1447 - protein, 10 aa, synthetic construct
  REGION 1..10: note = Description of Artificial Sequence: Synthetic peptide
CRWRWKCCKK

SEQ ID NO: 1448 - protein, 17 aa, synthetic construct
  REGION 1..17: note = Description of Artificial Sequence: Synthetic peptide
GRPRESGKKRKRKRLKP

SEQ ID NO: 1449 - protein, 18 aa, synthetic construct
  REGION 1..18: note = Description of Artificial Sequence: Synthetic peptide
RKKRRRESRRARRSPRHL

SEQ ID NO: 1450 - protein, 14 aa, synthetic construct
  REGION 1..14: note = Description of Artificial Sequence: Synthetic peptide
SRRARRSPRHLGSG

SEQ ID NO: 1451 - protein, 22 aa, synthetic construct
  REGION 1..22: note = Description of Artificial Sequence: Synthetic peptide
TKRRITPKDVIDVRSVTTEINT

SEQ ID NO: 1452 - protein, 10 aa, synthetic construct
  REGION 1..10: note = Description of Artificial Sequence: Synthetic peptide
PRPLPFPRPG

SEQ ID NO: 1453 - protein, 16 aa, synthetic construct
  REGION 1..16: note = Description of Artificial Sequence: Synthetic peptide
GRQLRIAGRRLRGRSR

SEQ ID NO: 1454 - protein, 27 aa, synthetic construct
  REGION 1..27: note = Description of Artificial Sequence: Synthetic peptide
KLIKGRTPIKFGKADCDRPPKHSQNGK

SEQ ID NO: 1455 - protein, 12 aa, synthetic construct
  REGION 1..12: note = Description of Artificial Sequence: Synthetic peptide
KRIPNKKPGKKT

SEQ ID NO: 1456 - protein, 10 aa, synthetic construct
  REGION 1..10: note = Description of Artificial Sequence: Synthetic peptide
RRIPNRRPRR

SEQ ID NO: 1457 - protein, 11 aa, synthetic construct
  REGION 1..11: note = Description of Artificial Sequence: Synthetic peptide
KTIPSNKPKKK

SEQ ID NO: 1458 - protein, 17 aa, synthetic construct
  REGION 1..17: note = Description of Artificial Sequence: Synthetic peptide
DRRRRGSRPSGAERRRR

SEQ ID NO: 1459 - protein, 11 aa, synthetic construct
  REGION 1..11: note = Description of Artificial Sequence: Synthetic peptide
NRARRNRRRVR

SEQ ID NO: 1460 - protein, 16 aa, synthetic construct
  REGION 1..16: note = Description of Artificial Sequence: Synthetic peptide
KRPAAIKKAGQAKKKK

SEQ ID NO: 1461 - protein, 9 aa, synthetic construct
  REGION 1..9: note = Description of Artificial Sequence: Synthetic peptide
KCPSRRPKR

SEQ ID NO: 1462 - protein, 12 aa, synthetic construct
  REGION 1..12: note = Description of Artificial Sequence: Synthetic peptide
TRRSKRRSHRKF

SEQ ID NO: 1463 - protein, 25 aa, synthetic construct
  REGION 1..25: note = Description of Artificial Sequence: Synthetic peptide
GTKMIFVGIKKKEERADLIAYLKKA

SEQ ID NO: 1464 - protein, 19 aa, synthetic construct
  REGION 1..19: note = Description of Artificial Sequence: Synthetic peptide
NAKTRRHERRRKLAIERGC

SEQ ID NO: 1465 - protein, 24 aa, synthetic construct
  REGION 1..24: note = Description of Artificial Sequence: Synthetic peptide
MDAQTRRRERRAEKQAQWKAANGC

SEQ ID NO: 1466 - protein, 20 aa, synthetic construct
  REGION 1..20: note = Description of Artificial Sequence: Synthetic peptide
TAKTRYKARRAELIAERRGC

SEQ ID NO: 1467 - protein, 30 aa, synthetic construct
  REGION 1..30: note = Description of Artificial Sequence: Synthetic polypeptide
RIKAERKRMRNRIAASKSRKRKLERIARGC

SEQ ID NO: 1468 - protein, 24 aa, synthetic construct
  REGION 1..24: note = Description of Artificial Sequence: Synthetic peptide
KRARNTEAARRSRARKLQRMKQGC

SEQ ID NO: 1469 - protein, 20 aa, synthetic construct
  REGION 1..20: note = Description of Artificial Sequence: Synthetic peptide
GLWRALWRLLRSLWRLLWRA

SEQ ID NO: 1470 - protein, 34 aa, synthetic construct
  REGION 1..34: note = Description of Artificial Sequence: Synthetic polypeptide
DAATATRGRSAASRPTQRPRAPARSASRPRRPVE

SEQ ID NO: 1471 - protein, 34 aa, synthetic construct
  REGION 1..34: note = Description of Artificial Sequence: Synthetic polypeptide
AKVKDEPQRRSARLSAKPAPPKPEPKPKKAPAKK

SEQ ID NO: 1472 - protein, 12 aa, synthetic construct
  REGION 1..12: note = Description of Artificial Sequence: Synthetic peptide
PLSSIFSRIGDP

SEQ ID NO: 1473 - protein, 8 aa, synthetic construct
  REGION 1..8: note = Description of Artificial Sequence: Synthetic peptide
SKKKKTKV

SEQ ID NO: 1474 - protein, 8 aa, synthetic construct
  REGION 1..8: note = Description of Artificial Sequence: Synthetic peptide
GRKRKKRT

SEQ ID NO: 1475 - protein, 10 aa, synthetic construct
  REGION 1..10: note = Description of Artificial Sequence: Synthetic peptide
VQRKRQKLMP

SEQ ID NO: 1476 - protein, 14 aa, synthetic construct
  REGION 1..14: note = Description of Artificial Sequence: Synthetic peptide
YKQCHKKGGKKGSG

SEQ ID NO: 1477 - protein, 23 aa, synthetic construct
  REGION 1..23: note = Description of Artificial Sequence: Synthetic peptide
LIRLWSHLIHIWFQNRRLKWKKK

SEQ ID NO: 1478 - protein, 19 aa, synthetic construct
  REGION 1..19: note = Description of Artificial Sequence: Synthetic peptide
TRQARRNRRRRWRERQRGC

SEQ ID NO: 1479 - protein, 17 aa, synthetic construct
  REGION 1..17: note = Description of Artificial Sequence: Synthetic peptide
RRRRNRTRRNRRRVRGC

SEQ ID NO: 1480 - protein, 21 aa, synthetic construct
  REGION 1..21: note = Description of Artificial Sequence: Synthetic peptide
KMTRAQRRAAARRNRWTARGC

SEQ ID NO: 1481 - protein, 15 aa, synthetic construct
  REGION 1..15: note = Description of Artificial Sequence: Synthetic peptide
TRRQRTRRARRNRGC

SEQ ID NO: 1482 - protein, 10 aa, synthetic construct
  REGION 1..10: note = Description of Artificial Sequence: Synthetic peptide
KFFKFFKFFK

SEQ ID NO: 1483 - protein, 17 aa, synthetic construct
  REGION 1..17: note = Description of Artificial Sequence: Synthetic peptide
  VARIANT 2: note = MOD_RES - Any amino acid
  VARIANT 5: note = MOD_RES - Any amino acid
  VARIANT 13: note = MOD_RES - Any amino acid
  VARIANT 16: note = MOD_RES - Any amino acid
RXRRXRILFQYRXRRXR

SEQ ID NO: 1484 - protein, 17 aa, synthetic construct
  REGION 1..17: note = Description of Artificial Sequence: Synthetic peptide
  VARIANT 2: note = MOD_RES - Any amino acid
  VARIANT 5: note = MOD_RES - Any amino acid
  VARIANT 13: note = MOD_RES - Any amino acid
  VARIANT 16: note = MOD_RES - Any amino acid
RXRRXRYQFLIRXRRXR

SEQ ID NO: 1485 - protein, 17 aa, synthetic construct
  REGION 1..17: note = Description of Artificial Sequence: Synthetic peptide
  VARIANT 2: note = MOD_RES - Any amino acid
  VARIANT 5: note = MOD_RES - Any amino acid
  VARIANT 13: note = MOD_RES - Any amino acid
  VARIANT 16: note = MOD_RES - Any amino acid
RXRRXRIKFQYRXRRXR

SEQ ID NO: 1486 - protein, 17 aa, synthetic construct
  REGION 1..17: note = Description of Artificial Sequence: Synthetic peptide
  VARIANT 2: note = MOD_RES - Any amino acid
  VARIANT 5: note = MOD_RES - Any amino acid
  VARIANT 13: note = MOD_RES - Any amino acid
  VARIANT 16: note = MOD_RES - Any amino acid
RXRRXRIWFQYRXRRXR

SEQ ID NO: 1487 - protein, 12 aa, synthetic construct
  REGION 1..12: note = Description of Artificial Sequence: Synthetic peptide
GRKKRRQRRRPQ

SEQ ID NO: 1488 - protein, 11 aa, synthetic construct
  REGION 1..11: note = Description of Artificial Sequence: Synthetic peptide
GRKKRRQRRRP

SEQ ID NO: 1489 - protein, 11 aa, synthetic construct
  REGION 1..11: note = Description of Artificial Sequence: Synthetic peptide
GRKKRRQRRRG

SEQ ID NO: 1490 - protein, 9 aa, synthetic construct
  REGION 1..9: note = Description of Artificial Sequence: Synthetic peptide
RKKRRQRRR

SEQ ID NO: 1491 - protein, 112 aa, Homo sapiens
NWVNVISDLKKIEDLIQSMHIDATLYTESDVHPSCKVTAMKCFLLELQVISLESGDASIHDTVENLIILANNSLSSNGNVTESGCKECEELEEKNIKEFLQSFVHIVQMFIN

SEQ ID NO: 1492 - protein, 15 aa, synthetic construct
  REGION 1..15: note = Description of Artificial Sequence: Synthetic peptide
CGYGRKKRRQRRRGC

SEQ ID NO: 1493 - protein, 321 aa, synthetic construct
  REGION 1..321: note = Description of Artificial Sequence: Synthetic polypeptide
  VARIANT 21..89: note = MOD_RES - This region may encompass one of the following sequences: GSMCMPCFTTDHQMARKCDDCCGGKGRGKCYGPQCLCR or GSMCMPCFTTDHQMARRCDDCCGGRGRGKCYGPQCLCR or GSMCMPCFTTDHQMARRCDDCCGGRGRGRCYGPQCLCR or GSMCMPCFTTDHQMARKCDDCCGGRGRGRCYGPQC or LCR or GSMCMPCFTTDHQMARRCDDCCGGKGRGRCYGPQCLCR or GSMCMPCFTTHHRMAENCDICCGGDGRGKCYGPQCLCR or GSMCMPCFTTDTQMQERCDRCCGGGGRGKCWGPQCLCI or GSMCMPCFTTDTQMQERCDRCCGGGGRGRCWGPQCLCI or GSMCMPCFTTEQRMAIICDDCCGGF or GRGKCYGPQCLCR or GSMCMPCFTTEQRMAIICDDCCGGFGRGRCYGPQCLCR or GSICIPCFTTDHQIARRCDDCCGGRGRGKCYGPQCICR or GSICIPCFTTDHQIARRCDDCCGGRGRGRCYGPQCICR or GSMCMPCFTTDHRMAENCDICCGGDGRGKCYGPQCLCR or GSMCMPCFTTDHR or MAENCDICCGGDGRGRCYGPQCLCR or GSMCMPCFTTEQRMAIICDDCCGGFGRGKCYGPQCLCI or GSMCMPCFTTEQRMAIICDDCCGGFGRGRCYGPQCLCI or GSICIPCFTTDHQIARRCDDCCGGRGRGKCYGPQCICI or GSICIPCFTTDHQIARRCDDCCGGRGRGRCYGPQCICI or G or SMCMPCFTTDHRMAENCDICCGGDGRGKCYGPQCLCI or GSMCMPCFTTDHRMAENCDICCGGDGRGRCYGPQCLCI or GSMCMPCFTTDTQMQEKCDRCCGGGGRGRCWGPQCLCI; note = CONT. FROM ABOVE: GSMCMPCFTTEQRMAIKCDDCCGGFGRGRCYGPQCLCR or GSICIPCFTTDHQIARKCDDCCGGRGRGRCYGP or QCICR or GSMCMPCFTTDHRMAEKCDICCGGDGRGRCYGPQCLCR or GSMCMPCFTTDTQMQERCDRCCGGKGRGRCWGPQCLCI or GSMCMPCFTTEQRMAIICDDCCGGKGRGRCYGPQCLCR or GSICIPCFTTDHQIARRCDDCCGGKGRGRCYGPQCICR or GSMCMPCFTTDHRMAENCDIC or CGGKGRGRCYGPQCLCR or GSMCMPCFTTHHRMAENCDICCGGDGRGRCYGPQCLCR or GSMCMPCFTTDTQMQERCDRCCGGGGRGRCWGPQCLC or GSMCMPCFTTEQRMAIICDDCCGGFGRGRCYGPQCLC or GSICIPCFTTDHQIARRCDDCCGGRGRGRCYGPQCIC or GSMCMPCFTTDH or RMAENCDICCGGDGRGRCYGPQCLC or GSMCMPCFTTDHQMARRCDDCCGGRGRGRCYGPQCLCI or GSACAPCFTTDHQAARRCDDCCGGRGRGKCYGPQCLCR or GSACAPCFTTDHQAARKCDDCCGGKGRGKCYGPQCLCR or GSMCMPCFTTHHRMAENCDICCGGDGRGKCYGPQCLCI or G or SMCMPCFTTHHRMAENCDICCGGDGRGKCYGPQCLC or GSMCMPCFTTDHQMARRCDDCCGGRGRGRCYGPQCLC or GSMCMPCFTTHHQMAENCDICCGGDGRGKCYGPQCLCR or GSMCMPCFTTHHRMARNCDICCGGDGRGKCYGPQCLCR or GSMCMPCFTTHHRMAERCDICCGGDGRGKCYGPQC or LCR or GSMCMPCFTTHHRMAENCDDCCGGDGRGKCYGPQCLCR or GSRCMPCFTTDHQMARRCDDCCGGRGRGKCYGPQCLCR; note = CONT. FROM ABOVE: GSICIPCFTTDHQIARRCDDCCGGRGRGKCYGPQCLCR or GSMCLPCFTTDHQLARRCDDCCGGRGRGKCYGPQCLCR or GSMCMPCFTTEHQMARRCEECCG or GRGRGKCYGPQCLCR or GSMCIPCFTTDHQMARRCEECCGGRGRGKCYGPQCLCR or GSICIPCFTTDHQMARRCDDCCGGRGDGKCYGPQCLCR or GSRCMPCFTTDHFMARFCDFCCGGRGRGKCYGPQCLCR or GSRCMPCFTTDHYMARYCDYCCGGRGRGKCYGPQCLCR or GSRCMPCFTTD or HRMARRCDRCCGGRGRGKCYGPQCLCR or GSRCMPCFTTDHEMARECDECCGGRGRGKCYGPQCLCR or GSRCMPCFTTDHHMARHCDHCCGGRGRGKCYGPQCLCR or GSLCLPCFTTHHRLADQCDICCGGDGRGKCYGPQCLCR or GSICIPCFTTEHQIARRCEECCGGRGRGKCYGPQCLCR or GSMCMPCFTTIYRMAHECDECCGGRGRGKCYGPQCLCR or GSMCMPCFTTGYRMAEYCDICCGGRGRGKCYGPQCLCR or GSMCMPCFTTHRRMANTCDACCGGRSRGKCYGPQCLCR or GSHCMPCFTTDHQMIRRCDDCCGGGSYGKCDGPQCLCF or GSDCMPCFTTDHRMADHCDICCGGDDRGKCY or GPQCLCR or GSMCMPCFTTDHEMERRCDDCCGIGGGGKCHGPQCLCG or GSMCMPCFTTSEQMFRRCDDCCGGWGDGKCNGPHCLCR or GSCGPCFTTDHQMEQKCAECCGGIGKCYGPQCLCNR or GSRCGPCFTTDPQTQAKCSECCGRKGGVCKGPQCICGIQY or GSMCMPCFTTDPNMAKKCR or DCCGGNGKCFGPQCLCNR or GSMCMPCFTTDHNMAKKCNDCCGGYGKCFGPQCLCR; note = CONT. FROM ABOVE: GSRCPPCFTTNPNMEADCRKCCGGRGYCASYQCICPGG or GSMCMPCFTTDPNMANKCRDCCGGGKKCFGPQCLCNR or GSMKFLYGVILIALFLTVMTATLSEARCGPCFTTDPQTQAKCSECCGRKGGVCKG or PQCICGIQY or GSMCMPCFTTRPDMAQQCRACCKGRGKCFGPQCLCGYD or GSMKFLYGIVFIALFLTVMTATLSDAMCMPCFTTDHNMAKKCRDCCGGNGKCFGPQCLC NRG or GSMCMPCFTTDHNMAKKCRDCCGGNGKCFGPQCLCNR or GSMKFLYGIVFITLFLTVMIATHTEAMCMPCFTTRPNM or AQQCRDCCRGRGKCFGPQCLCGYD or GSMKFLYGIVFIALFLTVMIATHTEAMCMPCFTTRPNMAQQCRDCCRGRGKCFGPQCLC GYD or GSRCKPCFTTDPQMSKKCADCCGGKGKGKCYGPQCLC or GSMKFLYGIVFITLFLTVMIATHTEAAMCMPCFTTNLNMEQECRDCCGGTGRCFGPQCL CGYD or GSRCSPCFTTDQQMTKKCYDCCGGKGKGKCYGPQCICAPY or GSCGPCFTTDPYTESKCATCCGGRGKCVGPQCLCNRI or GSTEAMCMPCFTTDHNMAKKCRDCCGGNGKCFGYQCLCNRG or GSMKFLYGIVFIALFLTVMFATQTDGCGPCFTTDANMARKCRECCGGIGKCFGPQCLCN RI or GSM or KFLYGIVFIALFLTVMFATQTDGCGPCFTTDANMARKCRECCGGNGKCFGPQCLCNRE or GSMKFLYGTILIAFFLTVMIATHSEARCPPCFTTNPNMEADCRKCCGGRGYCASYQCIC PGG or [sequence omitted] or GSMKFLYGIVFIALFLTVMIATLTEAMCM; note = CONT. FROM ABOVE: PCFTTRPDMAQQCRDCCGGNGKCFGYQCLCNRG or GSMKFLYGIVFIALFLTVMIATHTEAMCMPCFTTRPDMAQQCRDCCGGNGKCFGYQCLC NRG or GSMKFLYGIILIALFLTVMIATHSEARCPNCFTTNPNAEADCKKCCGNRWGKCAGYQCV CPMK or GSMKFLYGIVFIALFLTGMIATHTEAMCMPCF or TTRPDMAQQCRDCCGGNGKCFGYQCLCNRGRIVIMYT or GSMCMPCFTTRPGMAQQCRDCCGGNGKCFGYQCLCNR or GSMCIPCFTTNPNMAAKCNACCGSRRGSCRGPQCICR or GSMCIPCFTTNPNMAAKCNACCGSRRGSCRGPQCICN or GSMCIPCFTTNPNMAAKCNACCGGNGSCRGPQCICN or GSMCIPCFTTNPNMAAKCNACCGSRGRGSCRGPQCICN or GSMCIPCFTTNPNMAAKCNACCGSRGRGKCRGPQCICN or GSMCIPCFTTDHQMAAKCNACCGSRRGSCRGPQCICN or GSMCIPCFTTNHQMAAKCNACCGSRRGSCRGPQCICN or GSMCIPCFTTNPNMARKCNACCGSRGRG or SCRGPQCICN or GSMCIPCFTTNPNMAAKCNACCGGKGRGSCRGPQCICN or GSMCIPCFTTNPNMAAKCNACCGSRRGSCFGPQCICN or GSMCIPCFTTNPNMAAKCNACCGSRGRGKCFGPQCICN or GSMCIPCFTTNPNMAAKCNACCGSRGRGSCFGPQCICN or GSMCIPCFTTNPNMAAK or CNACCGSRGRGSCYGPQCICN or GSMCIPCFTTNPNMAAKCDACCGSRRGSCRGPQCICN or GSMCIPCFTTNHQMAAKCDACCGSRRGSCRGPQCICN or GSMCIPCFTTNHNMAAKCDACCGGRGRGSCRGPQCICN; note = CONT. FROM ABOVE: GSMCIPCFTTNPNMAAKCDACCGSRGRGSCRGPQCICN or GSMCIPC or FTTNPNMAAKCDACCGGKGRGSCRGPQCICN or GSMCIPCFTTNHNMAAKCDACCGSRGRGSCRGPQCICN or GSMCIPCFTTNPNMAAKCRDCCGGRGSCRGPQCICN or GSMCMPCFTTNPNMAAKCDDCCGSRGRGSCRGPQCICN or GSMCIPCFTTNPNMAARCNACCGSRRGSCRGPQCIC or GSMCIPCFTTNPNMAAKCNACCGSRRGSCRGPQCICI or GSMCMPCFTTDHQMARACDDCCGGKGRGKCYGPQCLCR or GSMCMPCFTTDHQMARRCDDCCGGKGRGKCYGPQCLCR or GSMCMPCFTTDHQMARKCDDCCGGAGRGKCYGPQCLCR or GSMCMPCFTTDHQMARACDDCCGGAGRGKCYG or PQCLCR or GSMCMPCFTTDHQMARRCDDCCGGAGRGKCYGPQCLCR or GSMCMPCFTTDHQMARKCDDCCGGRGRGKCYGPQCLCR or GSMCMPCFTTDHQMARACDDCCGGRGRGKCYGPQCLCR or GSMCMPCFTTDHQMARKCDDCCGGKGRGACYGPQCLCR or GSMCMPCFTTDHQMARACDD or CCGGKGRGACYGPQCLCR or GSMCMPCFTTDHQMARRCDDCCGGKGRGACYGPQCLCR or GSMCMPCFTTDHQMARKCDDCCGGAGRGACYGPQCLCR or GSMCMPCFTTDHQMARACDDCCGGAGRGACYGPQCLCR or GSMCMPCFTTDHQMARRCDDCCGGAGRGACYGPQCLCR or GSMCMPCF or TTDHQMARKCDDCCGGRGRGACYGPQCLCR or GSMCMPCFTTDHQMARACDDCCGGRGRGACYGPQCLCR or GSMCMPCFTTDHQMARRCDDCCGGRGRGACYGPQCLCR; note = CONT. FROM ABOVE: GSMCMPCFTTDHQMARKCDDCCGGKGRGRCYGPQCLCR or GSMCMPCFTTDHQMARACDDCCGGKGRGRCYGPQCLCR or GSMCMPCFTTDHQMARKCDDCCGGAGRGRCYGPQCLCR or GSMCMPCFTTDHQMARACDDCCGGAGRGRCYGPQCLCR or GSMCMPCFTTDHQMARRCDDCCGGAGRGRCYGPQCLCR or GSMCMPCFTTDHQMARACDDCCGGRGRGRCYGPQCLCR or GSKCMPCFTTDHQMARRCDDCCGGRGRG or RCYGPQCLCR or GSACAPCFTTDHQAARRCDDCCGGRGRGRCYGPQCLCR or GSKCAPCFTTDHQAARRCDDCCGGRGRGRCYGPQCLCR or GSMCMPCFTTDHQMARCDDCCGGGRGKCYGPQCLCR or GSMCMPCFTTDHQMARCDDCCGGGRGCYGPQCLCR or GSKCMPCFTTDHQMARCDDCC or GGGRGCYGPQCLCR or GSACAPCFTTDHQAARCDDCCGGGRGKCYGPQCLCR or GSACAPCFTTDHQAARCDDCCGGGRGCYGPQCLCR or GSKCAPCFTTDHQAARCDDCCGGGRGCYGPQCLCR or GSMCMPCFTTDHQMARKCDDCCGGKGRGKCYGPQCLCRGAGAAGG or GSMCMPCFTTDHQ or MARACDDCCGGKGRGKCYGPQCLCRGAGAAGG or GSMCMPCFTTDHQMARRCDDCCGGKGRGKCYGPQCLCRGAGAAGG or GSMCMPCFTTDHQMARKCDDCCGGAGRGKCYGPQCLCRGAGAAGG or GSMCMPCFTTDHQMARACDDCCGGAGRGKCYGPQCLCRGAGAAGG or GSMCMPCFTTDHQMARR or CDDCCGGAGRGKCYGPQCLCRGAGAAGG or GSMCMPCFTTDHQMARKCDDCCGGRGRGKCYGPQCLCRGAGAAGG; note = CONT. FROM ABOVE: GSMCMPCFTTDHQMARACDDCCGGRGRGKCYGPQCLCRGAGAAGG or GSMCMPCFTTDHQMARRCDDCCGGRGRGKCYGPQCLCRGAGAAGG or GSMCMPCFTTDHQMARKCDDC or CGGKGRGACYGPQCLCRGAGAAGG or GSMCMPCFTTDHQMARACDDCCGGKGRGACYGPQCLCRGAGAAGG or GSMCMPCFTTDHQMARRCDDCCGGKGRGACYGPQCLCRGAGAAGG or GSMCMPCFTTDHQMARKCDDCCGGAGRGACYGPQCLCRGAGAAGG or GSMCMPCFTTDHQMARACDDCCGGA or GRGACYGPQCLCRGAGAAGG or GSMCMPCFTTDHQMARRCDDCCGGAGRGACYGPQCLCRGAGAAGG or GSMCMPCFTTDHQMARKCDDCCGGRGRGACYGPQCLCRGAGAAGG or GSMCMPCFTTDHQMARACDDCCGGRGRGACYGPQCLCRGAGAAGG or GSMCMPCFTTDHQMARRCDDCCGGRGRGA or CYGPQCLCRGAGAAGG or GSMCMPCFTTDHQMARKCDDCCGGKGRGRCYGPQCLCRGAGAAGG or GSMCMPCFTTDHQMARACDDCCGGKGRGRCYGPQCLCRGAGAAGG or GSMCMPCFTTDHQMARRCDDCCGGKGRGRCYGPQCLCRGAGAAGG or GSMCMPCFTTDHQMARKCDDCCGGAGRGRCYGP or QCLCRGAGAAGG or GSMCMPCFTTDHQMARACDDCCGGAGRGRCYGPQCLCRGAGAAGG or GSMCMPCFTTDHQMARRCDDCCGGAGRGRCYGPQCLCRGAGAAGG or GSMCMPCFTTDHQMARKCDDCCGGRGRGRCYGPQCLCRGAGAAGG or GSMCMPCFTTDHQMARACDDCCGGRGRGRCYGPQCLC or RGAGAAGG; note = CONT. FROM ABOVE: GSMCMPCFTTDHQMARRCDDCCGGRGRGRCYGPQCLCRGAGAAGG or GSKCMPCFTTDHQMARRCDDCCGGRGRGRCYGPQCLCRGAGAAGG or GSACAPCFTTDHQAARRCDDCCGGRGRGRCYGPQCLCRGAGAAGG or GSKCAPCFTTDHQAARRCDDCCGGRGRGRCYGPQCLCRGAG or AAGG or GSMCMPCFTTDHQMARCDDCCGGGRGKCYGPQCLCRGAGAAGG or GSMCMPCFTTDHQMARCDDCCGGGRGCYGPQCLCRGAGAAGG or GSKCMPCFTTDHQMARCDDCCGGGRGCYGPQCLCRGAGAAGG or GSACAPCFTTDHQAARCDDCCGGGRGKCYGPQCLCRGAGAAGG or GSAC or APCFTTDHQAARCDDCCGGGRGCYGPQCLCRGAGAAGG or GSKCAPCFTTDHQAARCDDCCGGGRGCYGPQCLCRGAGAAGG or GSMCMPCFTTDHQMVRKCDDCCGGKGRGKCYGPQCLCR or GSMCMPCFTTDHQMVRVCDDCCGGKGRGKCYGPQCLCR or GSMCMPCFTTDHQMVRRCDDCCGGKGRG or KCYGPQCLCR or GSMCMPCFTTDHQMVRKCDDCCGGVGRGKCYGPQCLCR or GSMCMPCFTTDHQMVRVCDDCCGGVGRGKCYGPQCLCR or GSMCMPCFTTDHQMVRRCDDCCGGVGRGKCYGPQCLCR or GSMCMPCFTTDHQMVRKCDDCCGGRGRGKCYGPQCLCR or GSMCMPCFTTDHQMVR or VCDDCCGGRGRGKCYGPQCLCR or GSMCMPCFTTDHQMVRRCDDCCGGRGRGKCYGPQCLCR or GSMCMPCFTTDHQMVRKCDDCCGGKGRGVCYGPQCLCR or GSMCMPCFTTDHQMVRVCDDCCGGKGRGVCYGPQCLCR; note = CONT. FROM ABOVE: GSMCMPCFTTDHQMVRRCDDCCGGKGRGVCYGPQCLCR or GSMC or MPCFTTDHQMVRKCDDCCGGVGRGVCYGPQCLCR or GSMCMPCFTTDHQMVRVCDDCCGGVGRGVCYGPQCLCR or GSMCMPCFTTDHQMVRRCDDCCGGVGRGVCYGPQCLCR or GSMCMPCFTTDHQMVRKCDDCCGGRGRGVCYGPQCLCR or GSMCMPCFTTDHQMVRVCDDCCGGRGRGVCYGPQCL or CR or GSMCMPCFTTDHQMVRRCDDCCGGRGRGVCYGPQCLCR or GSMCMPCFTTDHQMVRKCDDCCGGKGRGRCYGPQCLCR or GSMCMPCFTTDHQMVRVCDDCCGGKGRGRCYGPQCLCR or GSMCMPCFTTDHQMVRRCDDCCGGKGRGRCYGPQCLCR or GSMCMPCFTTDHQMVRKCDDCCGG or VGRGRCYGPQCLCR or GSMCMPCFTTDHQMVRVCDDCCGGVGRGRCYGPQCLCR or GSMCMPCFTTDHQMVRRCDDCCGGVGRGRCYGPQCLCR or GSMCMPCFTTDHQMVRKCDDCCGGRGRGRCYGPQCLCR or GSMCMPCFTTDHQMVRVCDDCCGGRGRGRCYGPQCLCR or GSMCMPCFTTDH or QMVRRCDDCCGGRGRGRCYGPQCLCR or GSKCMPCFTTDHQMVRRCDDCCGGRGRGRCYGPQCLCR or GSVCVPCFTTDHQVVRRCDDCCGGRGRGRCYGPQCLCR or GSKCVPCFTTDHQVVRRCDDCCGGRGRGRCYGPQCLCR or GSMCMPCFTTDHQMVRCDDCCGGGRGKCYGPQCLCR or GS or MCMPCFTTDHQMVRCDDCCGGGRGCYGPQCLCR or GSKCMPCFTTDHQMVRCDDCCGGGRGCYGPQCLCR or GSVCVPCFTTDHQVVRCDDCCGGGRGKCYGPQCLCR; note = CONT. FROM ABOVE: GSVCVPCFTTDHQVVRCDDCCGGGRGCYGPQCLCR or GSKCVPCFTTDHQVVRCDDCCGGGRGCYGPQCLCR or GSMC or MPCFTTDHQMVRKCDDCCGGKGRGKCYGPQCLCRGAGAAGG or GSMCMPCFTTDHQMVRVCDDCCGGKGRGKCYGPQCLCRGAGAAGG or GSMCMPCFTTDHQMVRRCDDCCGGKGRGKCYGPQCLCRGAGAAGG or GSMCMPCFTTDHQMVRKCDDCCGGVGRGKCYGPQCLCRGAGAAGG or GSMCMPCF or TTDHQMVRVCDDCCGGVGRGKCYGPQCLCRGAGAAGG or GSMCMPCFTTDHQMVRRCDDCCGGVGRGKCYGPQCLCRGAGAAGG or GSMCMPCFTTDHQMVRKCDDCCGGRGRGKCYGPQCLCRGAGAAGG or GSMCMPCFTTDHQMVRVCDDCCGGRGRGKCYGPQCLCRGAGAAGG or GSMCMPCFTTDH or QMVRRCDDCCGGRGRGKCYGPQCLCRGAGAAGG or GSMCMPCFTTDHQMVRKCDDCCGGKGRGVCYGPQCLCRGAGAAGG or GSMCMPCFTTDHQMVRVCDDCCGGKGRGVCYGPQCLCRGAGAAGG or GSMCMPCFTTDHQMVRRCDDCCGGKGRGVCYGPQCLCRGAGAAGG or GSMCMPCFTTDHQMVR or KCDDCCGGVGRGVCYGPQCLCRGAGAAGG or GSMCMPCFTTDHQMVRVCDDCCGGVGRGVCYGPQCLCRGAGAAGG or GSMCMPCFTTDHQMVRRCDDCCGGVGRGVCYGPQCLCRGAGAAGG or GSMCMPCFTTDHQMVRKCDDCCGGRGRGVCYGPQCLCRGAGAAGG or GSMCMPCFTTDHQMVRVCDD or CCGGRGRGVCYGPQCLCRGAGAAGG or GSMCMPCFTTDHQMVRRCDDCCGGRGRGVCYGPQCLCRGAGAAGG; note = CONT. FROM ABOVE: GSMCMPCFTTDHQMVRKCDDCCGGKGRGRCYGPQCLCRGAGAAGG or GSMCMPCFTTDHQMVRVCDDCCGGKGRGRCYGPQCLCRGAGAAGG or GSMCMPCFTTDHQMVRRCDDCCGG or KGRGRCYGPQCLCRGAGAAGG or GSMCMPCFTTDHQMVRKCDDCCGGVGRGRCYGPQCLCRGAGAAGG or GSMCMPCFTTDHQMVRVCDDCCGGVGRGRCYGPQCLCRGAGAAGG or GSMCMPCFTTDHQMVRRCDDCCGGVGRGRCYGPQCLCRGAGAAGG or GSMCMPCFTTDHQMVRKCDDCCGGRGRG or RCYGPQCLCRGAGAAGG or GSMCMPCFTTDHQMVRVCDDCCGGRGRGRCYGPQCLCRGAGAAGG or GSMCMPCFTTDHQMVRRCDDCCGGRGRGRCYGPQCLCRGAGAAGG or GSKCMPCFTTDHQMVRRCDDCCGGRGRGRCYGPQCLCRGAGAAGG or GSVCVPCFTTDHQVVRRCDDCCGGRGRGRCYG or PQCLCRGAGAAGG or GSKCVPCFTTDHQVVRRCDDCCGGRGRGRCYGPQCLCRGAGAAGG or GSMCMPCFTTDHQMVRCDDCCGGGRGKCYGPQCLCRGAGAAGG or GSMCMPCFTTDHQMVRCDDCCGGGRGCYGPQCLCRGAGAAGG or GSKCMPCFTTDHQMVRCDDCCGGGRGCYGPQCLCRGAGAAG or G or GSVCVPCFTTDHQVVRCDDCCGGGRGKCYGPQCLCRGAGAAGG or GSVCVPCFTTDHQVVRCDDCCGGGRGCYGPQCLCRGAGAAGG or GSKCVPCFTTDHQVVRCDDCCGGGRGCYGPQCLCRGAGAAGG or GSMCMPCFTTDHQMLRKCDDCCGGKGRGKCYGPQCLCR or GSMCMPCFTTDH or QMLRLCDDCCGGKGRGKCYGPQCLCR; note = CONT. FROM ABOVE: GSMCMPCFTTDHQMLRRCDDCCGGKGRGKCYGPQCLCR or GSMCMPCFTTDHQMLRKCDDCCGGLGRGKCYGPQCLCR or GSMCMPCFTTDHQMLRLCDDCCGGLGRGKCYGPQCLCR or GSMCMPCFTTDHQMLRRCDDCCGGLGRGKCYGPQCLCR or GSMCMPCFTTDHQMLRKCDDCCGGRGRGKCYGPQCLCR or GSMCMPCFTTDHQMLRLCDDCCGGRGRGKCYGPQCLCR or GSMCMPCFTTDHQMLRRCDDCCGGRGRGKCYGPQCLCR or GSMCMPCFTTDHQMLRKCDDCCGGKGRGLCYGPQCLCR or GSMCMPCFTTDHQMLRLCDDCCGGKGRGLCYG or PQCLCR or GSMCMPCFTTDHQMLRRCDDCCGGKGRGLCYGPQCLCR or GSMCMPCFTTDHQMLRKCDDCCGGLGRGLCYGPQCLCR or GSMCMPCFTTDHQMLRLCDDCCGGLGRGLCYGPQCLCR or GSMCMPCFTTDHQMLRRCDDCCGGLGRGLCYGPQCLCR or GSMCMPCFTTDHQMLRKCDD or CCGGRGRGLCYGPQCLCR or GSMCMPCFTTDHQMLRLCDDCCGGRGRGLCYGPQCLCR or GSMCMPCFTTDHQMLRRCDDCCGGRGRGLCYGPQCLCR or GSMCMPCFTTDHQMLRKCDDCCGGKGRGRCYGPQCLCR or GSMCMPCFTTDHQMLRLCDDCCGGKGRGRCYGPQCLCR or GSMCMPCF or TTDHQMLRRCDDCCGGKGRGRCYGPQCLCR or GSMCMPCFTTDHQMLRKCDDCCGGLGRGRCYGPQCLCR or GSMCMPCFTTDHQMLRLCDDCCGGLGRGRCYGPQCLCR or GSMCMPCFTTDHQMLRRCDDCCGGLGRGRCYGPQCLCR or GSMCMPCFTTDHQMLRKCDDCCGGRGRGRCYGPQCLCR; note = CONT. FROM ABOVE: GSMCMPCFTTDHQMLRLCDDCCGGRGRGRCYGPQCLCR or GSMCMPCFTTDHQMLRRCDDCCGGRGRGRCYGPQCLCR or GSKCMPCFTTDHQMLRRCDDCCGGRGRGRCYGPQCLCR or GSLCLPCFTTDHQLLRRCDDCCGGRGRGRCYGPQCLCR or GSKCLPCFTTDHQLLRRCDDCCGGRGRG or RCYGPQCLCR or GSMCMPCFTTDHQMLRCDDCCGGGRGKCYGPQCLCR or GSMCMPCFTTDHQMLRCDDCCGGGRGCYGPQCLCR or GSKCMPCFTTDHQMLRCDDCCGGGRGCYGPQCLCR or GSLCLPCFTTDHQLLRCDDCCGGGRGKCYGPQCLCR or GSLCLPCFTTDHQLLRCDDCCGGGRG or CYGPQCLCR or GSKCLPCFTTDHQLLRCDDCCGGGRGCYGPQCLCR or GSMCMPCFTTDHQMLRKCDDCCGGKGRGKCYGPQCLCRGAGAAGG or GSMCMPCFTTDHQMLRLCDDCCGGKGRGKCYGPQCLCRGAGAAGG or GSMCMPCFTTDHQMLRRCDDCCGGKGRGKCYGPQCLCRGAGAAGG or GSMCMPCFTTDHQMLRKCDDCCGGLGRGKCYGPQCLCRGAGAAGG or GSMCMPCFTTDHQMLRLCDDCCGGLGRGKCYGPQCLCRGAGAAGG or GSMCMPCFTTDHQMLRRCDDCCGGLGRGKCYGPQCLCRGAGAAGG or GSMCMPCFTTDHQMLRKCDDCCGGRGRGKCYGPQCLCRGAGAAGG or GSM or CMPCFTTDHQMLRLCDDCCGGRGRGKCYGPQCLCRGAGAAGG or GSMCMPCFTTDHQMLRRCDDCCGGRGRGKCYGPQCLCRGAGAAGG or GSMCMPCFTTDHQMLRKCDDCCGGKGRGLCYGPQCLCRGAGAAGG; note = CONT. FROM ABOVE: GSMCMPCFTTDHQMLRLCDDCCGGKGRGLCYGPQCLCRGAGAAGG or GSMCMPC or FTTDHQMLRRCDDCCGGKGRGLCYGPQCLCRGAGAAGG or GSMCMPCFTTDHQMLRKCDDCCGGLGRGLCYGPQCLCRGAGAAGG or GSMCMPCFTTDHQMLRLCDDCCGGLGRGLCYGPQCLCRGAGAAGG or GSMCMPCFTTDHQMLRRCDDCCGGLGRGLCYGPQCLCRGAGAAGG or GSMCMPCFTTD or HQMLRKCDDCCGGRGRGLCYGPQCLCRGAGAAGG or GSMCMPCFTTDHQMLRLCDDCCGGRGRGLCYGPQCLCRGAGAAGG or GSMCMPCFTTDHQMLRRCDDCCGGRGRGLCYGPQCLCRGAGAAGG or GSMCMPCFTTDHQMLRKCDDCCGGKGRGRCYGPQCLCRGAGAAGG or GSMCMPCFTTDHQML or RLCDDCCGGKGRGRCYGPQCLCRGAGAAGG or GSMCMPCFTTDHQMLRRCDDCCGGKGRGRCYGPQCLCRGAGAAGG or GSMCMPCFTTDHQMLRKCDDCCGGLGRGRCYGPQCLCRGAGAAGG or GSMCMPCFTTDHQMLRLCDDCCGGLGRGRCYGPQCLCRGAGAAGG or GSMCMPCFTTDHQMLRRCD or DCCGGLGRGRCYGPQCLCRGAGAAGG or GSMCMPCFTTDHQMLRKCDDCCGGRGRGRCYGPQCLCRGAGAAGG or GSMCMPCFTTDHQMLRLCDDCCGGRGRGRCYGPQCLCRGAGAAGG or GSMCMPCFTTDHQMLRRCDDCCGGRGRGRCYGPQCLCRGAGAAGG or GSKCMPCFTTDHQMLRRCDDCCG or GRGRGRCYGPQCLCRGAGAAGG or GSLCLPCFTTDHQLLRRCDDCCGGRGRGRCYGPQCLCRGAGAAGG; note = CONT. FROM ABOVE: GSKCLPCFTTDHQLLRRCDDCCGGRGRGRCYGPQCLCRGAGAAGG or GSMCMPCFTTDHQMLRCDDCCGGGRGKCYGPQCLCRGAGAAGG or GSMCMPCFTTDHQMLRCDDCCGGGRGCYG or PQCLCRGAGAAGG or GSKCMPCFTTDHQMLRCDDCCGGGRGCYGPQCLCRGAGAAGG or GSLCLPCFTTDHQLLRCDDCCGGGRGKCYGPQCLCRGAGAAGG or GSLCLPCFTTDHQLLRCDDCCGGGRGCYGPQCLCRGAGAAGG or GSKCLPCFTTDHQLLRCDDCCGGGRGCYGPQCLCRGAGAAGG or GSGCGPCFTTDHQGARKCDDCCGGKGRGKCYGPQCLCR or GSGCGPCFTTDHQGARACDDCCGGKGRGKCYGPQCLCR or GSGCGPCFTTDHQGARRCDDCCGGKGRGKCYGPQCLCR or GSGCGPCFTTDHQGARKCDDCCGGAGRGKCYGPQCLCR or GSGCGPCFTTDHQGARACDDCCGGAGRG or KCYGPQCLCR or GSGCGPCFTTDHQGARRCDDCCGGAGRGKCYGPQCLCR or GSGCGPCFTTDHQGARKCDDCCGGRGRGKCYGPQCLCR or GSGCGPCFTTDHQGARACDDCCGGRGRGKCYGPQCLCR or GSGCGPCFTTDHQGARRCDDCCGGRGRGKCYGPQCLCR or GSGCGPCFTTDHQGAR or KCDDCCGGKGRGACYGPQCLCR or GSGCGPCFTTDHQGARACDDCCGGKGRGACYGPQCLCR or GSGCGPCFTTDHQGARRCDDCCGGKGRGACYGPQCLCR or GSGCGPCFTTDHQGARKCDDCCGGAGRGACYGPQCLCR or GSGCGPCFTTDHQGARACDDCCGGAGRGACYGPQCLCR or GSGC or GPCFTTDHQGARRCDDCCGGAGRGACYGPQCLCR; note = CONT. FROM ABOVE: GSGCGPCFTTDHQGARKCDDCCGGRGRGACYGPQCLCR or GSGCGPCFTTDHQGARACDDCCGGRGRGACYGPQCLCR or GSGCGPCFTTDHQGARRCDDCCGGRGRGACYGPQCLCR or GSGCGPCFTTDHQGARKCDDCCGGKGRGRCYGPQCL or CR or GSGCGPCFTTDHQGARACDDCCGGKGRGRCYGPQCLCR or GSGCGPCFTTDHQGARRCDDCCGGKGRGRCYGPQCLCR or GSGCGPCFTTDHQGARKCDDCCGGAGRGRCYGPQCLCR or GSGCGPCFTTDHQGARACDDCCGGAGRGRCYGPQCLCR or GSGCGPCFTTDHQGARRCDDCCGG or AGRGRCYGPQCLCR or GSGCGPCFTTDHQGARKCDDCCGGRGRGRCYGPQCLCR or GSGCGPCFTTDHQGARACDDCCGGRGRGRCYGPQCLCR or GSGCGPCFTTDHQGARRCDDCCGGRGRGRCYGPQCLCR or GSKCGPCFTTDHQGARRCDDCCGGRGRGRCYGPQCLCR or GSGCGPCFTTDH or QGARCDDCCGGGRGKCYGPQCLCR or GSGCGPCFTTDHQGARCDDCCGGGRGCYGPQCLCR or GSKCGPCFTTDHQGARCDDCCGGGRGCYGPQCLCR or GSACAPCFTTDHQAARACDDCCGGKGRGKCYGPQCLCR or GSACAPCFTTDHQAARRCDDCCGGKGRGKCYGPQCLCR or GSACAPCF or TTDHQAARKCDDCCGGAGRGKCYGPQCLCR or GSACAPCFTTDHQAARACDDCCGGAGRGKCYGPQCLCR or GSACAPCFTTDHQAARRCDDCCGGAGRGKCYGPQCLCR or GSACAPCFTTDHQAARKCDDCCGGRGRGKCYGPQCLCR or GSACAPCFTTDHQAARACDDCCGGRGRGKCYGPQCLCR; note = CONT. FROM ABOVE: GSACAPCFTTDHQAARKCDDCCGGKGRGACYGPQCLCR or GSACAPCFTTDHQAARACDDCCGGKGRGACYGPQCLCR or GSACAPCFTTDHQAARRCDDCCGGKGRGACYGPQCLCR or GSACAPCFTTDHQAARKCDDCCGGAGRGACYGPQCLCR or GSACAPCFTTDHQAARACDDCCGGAGRG or ACYGPQCLCR or GSACAPCFTTDHQAARRCDDCCGGAGRGACYGPQCLCR or GSACAPCFTTDHQAARKCDDCCGGRGRGACYGPQCLCR or GSACAPCFTTDHQAARACDDCCGGRGRGACYGPQCLCR or GSACAPCFTTDHQAARRCDDCCGGRGRGACYGPQCLCR or GSACAPCFTTDHQAAR or KCDDCCGGKGRGRCYGPQCLCR or GSACAPCFTTDHQAARACDDCCGGKGRGRCYGPQCLCR or GSACAPCFTTDHQAARRCDDCCGGKGRGRCYGPQCLCR or GSACAPCFTTDHQAARKCDDCCGGAGRGRCYGPQCLCR or GSACAPCFTTDHQAARACDDCCGGAGRGRCYGPQCLCR or GSAC or APCFTTDHQAARRCDDCCGGAGRGRCYGPQCLCR or GSACAPCFTTDHQAARKCDDCCGGRGRGRCYGPQCLCR or GSACAPCFTTDHQAARACDDCCGGRGRGRCYGPQCLCR or GSICIPCFTTDHQIARKCDDCCGGKGRGKCYGPQCLCR or GSICIPCFTTDHQIARACDDCCGGKGRGKCYGPQCL or CR or GSICIPCFTTDHQIARRCDDCCGGKGRGKCYGPQCLCR or GSICIPCFTTDHQIARKCDDCCGGAGRGKCYGPQCLCR or GSICIPCFTTDHQIARACDDCCGGAGRGKCYGPQCLCR or GSICIPCFTTDHQIARRCDDCCGGAGRGKCYGPQCLCR; note = CONT. FROM ABOVE: GSICIPCFTTDHQIARKCDDCCGG or RGRGKCYGPQCLCR or GSICIPCFTTDHQIARACDDCCGGRGRGKCYGPQCLCR or GSICIPCFTTDHQIARKCDDCCGGKGRGACYGPQCLCR or GSICIPCFTTDHQIARACDDCCGGKGRGACYGPQCLCR or GSICIPCFTTDHQIARRCDDCCGGKGRGACYGPQCLCR or GSICIPCFTTDH or QIARKCDDCCGGAGRGACYGPQCLCR or GSICIPCFTTDHQIARACDDCCGGAGRGACYGPQCLCR or GSICIPCFTTDHQIARRCDDCCGGAGRGACYGPQCLCR or GSICIPCFTTDHQIARKCDDCCGGRGRGACYGPQCLCR or GSICIPCFTTDHQIARACDDCCGGRGRGACYGPQCLCR or GSICIPCFTTDHQIARRCDDCCGGRGRGACYGPQCLCR or GSICIPCFTTDHQIARKCDDCCGGKGRGRCYGPQCLCR or GSICIPCFTTDHQIARACDDCCGGKGRGRCYGPQCLCR or GSICIPCFTTDHQIARRCDDCCGGKGRGRCYGPQCLCR or GSICIPCFTTDHQIARKCDDCCGGAGRGRCYG or PQCLCR or GSICIPCFTTDHQIARACDDCCGGAGRGRCYGPQCLCR or GSICIPCFTTDHQIARRCDDCCGGAGRGRCYGPQCLCR or GSICIPCFTTDHQIARKCDDCCGGRGRGRCYGPQCLCR or GSICIPCFTTDHQIARACDDCCGGRGRGRCYGPQCLCR or GSICIPCFTTDHQIARRCDD or CCGGRGRGRCYGPQCLCR or GSKCIPCFTTDHQIARRCDDCCGGRGRGRCYGPQCLCR or GSICIPCFTTDHQIARCDDCCGGGRGKCYGPQCLCR or GSICIPCFTTDHQIARCDDCCGGGRGCYGPQCLCR; note = CONT. FROM ABOVE: GSKCIPCFTTDHQIARCDDCCGGGRGCYGPQCLCR or GSTCTPCFTTDHQTAR or KCDDCCGGKGRGKCYGPQCLCR or GSTCTPCFTTDHQTARACDDCCGGKGRGKCYGPQCLCR or GSTCTPCFTTDHQTARRCDDCCGGKGRGKCYGPQCLCR or GSTCTPCFTTDHQTARKCDDCCGGAGRGKCYGPQCLCR or GSTCTPCFTTDHQTARACDDCCGGAGRGKCYGPQCLCR or GSTC or TPCFTTDHQTARRCDDCCGGAGRGKCYGPQCLCR or GSTCTPCFTTDHQTARKCDDCCGGRGRGKCYGPQCLCR or GSTCTPCFTTDHQTARACDDCCGGRGRGKCYGPQCLCR or GSTCTPCFTTDHQTARRCDDCCGGRGRGKCYGPQCLCR or GSTCTPCFTTDHQTARKCDDCCGGKGRGACYGPQCL or CR or GSTCTPCFTTDHQTARACDDCCGGKGRGACYGPQCLCR or GSTCTPCFTTDHQTARRCDDCCGGKGRGACYGPQCLCR or GSTCTPCFTTDHQTARKCDDCCGGAGRGACYGPQCLCR or GSTCTPCFTTDHQTARACDDCCGGAGRGACYGPQCLCR or GSTCTPCFTTDHQTARRCDDCCGG or AGRGACYGPQCLCR or GSTCTPCFTTDHQTARKCDDCCGGRGRGACYGPQCLCR or GSTCTPCFTTDHQTARACDDCCGGRGRGACYGPQCLCR or GSTCTPCFTTDHQTARRCDDCCGGRGRGACYGPQCLCR or GSTCTPCFTTDHQTARKCDDCCGGKGRGRCYGPQCLCR or GSTCTPCFTTDH or QTARACDDCCGGKGRGRCYGPQCLCR or GSTCTPCFTTDHQTARRCDDCCGGKGRGRCYGPQCLCR or GSTCTPCFTTDHQTARKCDDCCGGAGRGRCYGPQCLCR; note = CONT. FROM ABOVE: GSTCTPCFTTDHQTARACDDCCGGAGRGRCYGPQCLCR or GSTCTPCFTTDHQTARRCDDCCGGAGRGRCYGPQCLCR or GSTCTPCFTTDHQTARKCDDCCGGRGRGRCYGPQCLCR or GSTCTPCFTTDHQTARACDDCCGGRGRGRCYGPQCLCR or GSTCTPCFTTDHQTARRCDDCCGGRGRGRCYGPQCLCR or GSKCTPCFTTDHQTARRCDDCCGGRGRGRCYGPQCLCR or GSTCTPCFTTDHQTARCDDCCGGGRGKCYGPQ or CLCR or GSTCTPCFTTDHQTARCDDCCGGGRGCYGPQCLCR or GSKCTPCFTTDHQTARCDDCCGGGRGCYGPQCLCR or GSVCVPCFTTDHQVARKCDDCCGGKGRGKCYGPQCLCR or GSVCVPCFTTDHQVARACDDCCGGKGRGKCYGPQCLCR or GSVCVPCFTTDHQVARRCDDCCGGKGRG or KCYGPQCLCR or GSVCVPCFTTDHQVARKCDDCCGGAGRGKCYGPQCLCR or GSVCVPCFTTDHQVARACDDCCGGAGRGKCYGPQCLCR or GSVCVPCFTTDHQVARRCDDCCGGAGRGKCYGPQCLCR or GSVCVPCFTTDHQVARKCDDCCGGRGRGKCYGPQCLCR or GSVCVPCFTTDHQVAR or ACDDCCGGRGRGKCYGPQCLCR or GSVCVPCFTTDHQVARRCDDCCGGRGRGKCYGPQCLCR or GSVCVPCFTTDHQVARKCDDCCGGKGRGACYGPQCLCR or GSVCVPCFTTDHQVARACDDCCGGKGRGACYGPQCLCR or GSVCVPCFTTDHQVARRCDDCCGGKGRGACYGPQCLCR or GSVC or VPCFTTDHQVARKCDDCCGGAGRGACYGPQCLCR or GSVCVPCFTTDHQVARACDDCCGGAGRGACYGPQCLCR; note = CONT. FROM ABOVE: GSVCVPCFTTDHQVARRCDDCCGGAGRGACYGPQCLCR or GSVCVPCFTTDHQVARKCDDCCGGRGRGACYGPQCLCR or GSVCVPCFTTDHQVARACDDCCGGRGRGACYGPQCL or CR or GSVCVPCFTTDHQVARRCDDCCGGRGRGACYGPQCLCR or GSVCVPCFTTDHQVARKCDDCCGGKGRGRCYGPQCLCR or GSVCVPCFTTDHQVARACDDCCGGKGRGRCYGPQCLCR or GSVCVPCFTTDHQVARRCDDCCGGKGRGRCYGPQCLCR or GSVCVPCFTTDHQVARKCDDCCGG or AGRGRCYGPQCLCR or GSVCVPCFTTDHQVARACDDCCGGAGRGRCYGPQCLCR or GSVCVPCFTTDHQVARRCDDCCGGAGRGRCYGPQCLCR or GSVCVPCFTTDHQVARKCDDCCGGRGRGRCYGPQCLCR or GSVCVPCFTTDHQVARACDDCCGGRGRGRCYGPQCLCR or GSVCVPCFTTDH or QVARRCDDCCGGRGRGRCYGPQCLCR or GSKCVPCFTTDHQVARRCDDCCGGRGRGRCYGPQCLCR or GSVCVPCFTTDHQVARCDDCCGGGRGKCYGPQCLCR or GSVCVPCFTTDHQVARCDDCCGGGRGCYGPQCLCR or GSKCVPCFTTDHQVARCDDCCGGGRGCYGPQCLCR or GSLCLPCF or TTDHQLARKCDDCCGGKGRGKCYGPQCLCR or GSLCLPCFTTDHQLARACDDCCGGKGRGKCYGPQCLCR or GSLCLPCFTTDHQLARRCDDCCGGKGRGKCYGPQCLCR or GSLCLPCFTTDHQLARKCDDCCGGAGRGKCYGPQCLCR or GSLCLPCFTTDHQLARACDDCCGGAGRGKCYGPQCLCR or GSLCLPCFTTDHQLARRCDDCCGGAGRGKCYGPQCLCR; note = CONT. FROM ABOVE: GSLCLPCFTTDHQLARKCDDCCGGRGRGKCYGPQCLCR or GSLCLPCFTTDHQLARACDDCCGGRGRGKCYGPQCLCR or GSLCLPCFTTDHQLARRCDDCCGGRGRGKCYGPQCLCR or GSLCLPCFTTDHQLARKCDDCCGGKGRG or ACYGPQCLCR or GSLCLPCFTTDHQLARACDDCCGGKGRGACYGPQCLCR or GSLCLPCFTTDHQLARRCDDCCGGKGRGACYGPQCLCR or GSLCLPCFTTDHQLARKCDDCCGGAGRGACYGPQCLCR or GSLCLPCFTTDHQLARACDDCCGGAGRGACYGPQCLCR or GSLCLPCFTTDHQLAR or RCDDCCGGAGRGACYGPQCLCR or GSLCLPCFTTDHQLARKCDDCCGGRGRGACYGPQCLCR or GSLCLPCFTTDHQLARACDDCCGGRGRGACYGPQCLCR or GSLCLPCFTTDHQLARRCDDCCGGRGRGACYGPQCLCR or GSLCLPCFTTDHQLARKCDDCCGGKGRGRCYGPQCLCR or GSLC or LPCFTTDHQLARACDDCCGGKGRGRCYGPQCLCR or GSLCLPCFTTDHQLARRCDDCCGGKGRGRCYGPQCLCR or GSLCLPCFTTDHQLARKCDDCCGGAGRGRCYGPQCLCR or GSLCLPCFTTDHQLARACDDCCGGAGRGRCYGPQCLCR or GSLCLPCFTTDHQLARRCDDCCGGAGRGRCYGPQCL or CR or GSLCLPCFTTDHQLARKCDDCCGGRGRGRCYGPQCLCR or GSLCLPCFTTDHQLARACDDCCGGRGRGRCYGPQCLCR or GSLCLPCFTTDHQLARRCDDCCGGRGRGRCYGPQCLCR or GSKCLPCFTTDHQLARRCDDCCGGRGRGRCYGPQCLCR or GSLCLPCFTTDHQLARCDDCCGGG or RGKCYGPQCLCR; note = CONT. FROM ABOVE: GSLCLPCFTTDHQLARCDDCCGGGRGCYGPQCLCR or GSKCLPCFTTDHQLARCDDCCGGGRGCYGPQCLCR or GSSCSPCFTTDHQSARKCDDCCGGKGRGKCYGPQCLCR or GSSCSPCFTTDHQSARACDDCCGGKGRGKCYGPQCLCR or GSSCSPCFTTDHQSARRCDD or CCGGKGRGKCYGPQCLCR or GSSCSPCFTTDHQSARKCDDCCGGAGRGKCYGPQCLCR or GSSCSPCFTTDHQSARACDDCCGGAGRGKCYGPQCLCR or GSSCSPCFTTDHQSARRCDDCCGGAGRGKCYGPQCLCR or GSSCSPCFTTDHQSARKCDDCCGGRGRGKCYGPQCLCR or GSSCSPCF or TTDHQSARACDDCCGGRGRGKCYGPQCLCR or GSSCSPCFTTDHQSARRCDDCCGGRGRGKCYGPQCLCR or GSSCSPCFTTDHQSARKCDDCCGGKGRGACYGPQCLCR or GSSCSPCFTTDHQSARACDDCCGGKGRGACYGPQCLCR or GSSCSPCFTTDHQSARRCDDCCGGKGRGACYGPQCLCR or GSSCSPCFTTDHQSARKCDDCCGGAGRGACYGPQCLCR or GSSCSPCFTTDHQSARACDDCCGGAGRGACYGPQCLCR or GSSCSPCFTTDHQSARRCDDCCGGAGRGACYGPQCLCR or GSSCSPCFTTDHQSARKCDDCCGGRGRGACYGPQCLCR or GSSCSPCFTTDHQSARACDDCCGGRGRG or ACYGPQCLCR or GSSCSPCFTTDHQSARRCDDCCGGRGRGACYGPQCLCR or GSSCSPCFTTDHQSARKCDDCCGGKGRGRCYGPQCLCR or GSSCSPCFTTDHQSARACDDCCGGKGRGRCYGPQCLCR or GSSCSPCFTTDHQSARRCDDCCGGKGRGRCYGPQCLCR; note = CONT. FROM ABOVE: GSSCSPCFTTDHQSAR or KCDDCCGGAGRGRCYGPQCLCR or GSSCSPCFTTDHQSARACDDCCGGAGRGRCYGPQCLCR or GSSCSPCFTTDHQSARRCDDCCGGAGRGRCYGPQCLCR or GSSCSPCFTTDHQSARKCDDCCGGRGRGRCYGPQCLCR or GSSCSPCFTTDHQSARACDDCCGGRGRGRCYGPQCLCR or GSSC or SPCFTTDHQSARRCDDCCGGRGRGRCYGPQCLCR or GSKCSPCFTTDHQSARRCDDCCGGRGRGRCYGPQCLCR or GSSCSPCFTTDHQSARCDDCCGGGRGKCYGPQCLCR or GSSCSPCFTTDHQSARCDDCCGGGRGCYGPQCLCR or GSKCSPCFTTDHQSARCDDCCGGGRGCYGPQCLCR or GSMCMPCFTTDPNMARKCRDCCGGNGKCFGPQCLCNRG or GSMCMPCFTTDHNMAKKCRDCCGGNGKCFGYQCLCNRG or GSMCMPCFTTDHQTARRCRDCCGGRGRKCFGQCLCGYD or GSACGPCFTTDPQMAEKCSDCCGGIGTCYGPQCLCNRL or GSMCMPCFTTRPNMAQQCRDCCRGRGKCFGPQ or CLCG or GSMCMPCFTTRPNMAQQCRDCCRGRGKCFGPQCLCGYD or GSMCMPCFTTNLNMEQECRDCCGGTGRCFGPQCLCG or GSGCMPCFTTDRYMARKCKECCRGYGNCFGPQCLCNRG or GSGCGPCFTTDANMARKCRECCGGNGKCFGPQCLCNRE or GSGCGPCFTTDANMARKCRECCGG or IGKCFGPQCLCNRI or GSMCMPCFTTRPDMAQQCRACCKGRGKCFGPQCLCG or GSMCIPCFTTNPNMAAKCNACCGSRRGSCRGPQCIC or [sequence omitted]; note = CONT. FROM ABOVE: GSCGPCFTTDPYTESKCATCCGGRGKCVGPQCLCNR or GSRCGPCFTTDPQTQAKCS or ECCGRKGGVCKGPQCICG or GSCGPCFTKDPETEKKCATCCGGIGRCFGPQCLCNRG or GSMCMPCFTTDHQMARRCDDCCGGRGRGKCWGPQCLCR or GSAMCMPCFTTDHNMAKKCRDCCGGNGKCFGPQCLCNRG or GSCGPCFTTDWESEKKCAECCGGIGRCFGPQCLCNRK or GSCGPCFTT or DHQTEQKCAECCGGIGKCYGPQCLCRG or GSCGPCFTTDRQMEQKCAECCGGIGKCYGPQCLCRG or GSCGPCFTTDHQTEQKCAECCGGIGKCYGPQCLC or GSCMPCFTTDHQMARKCDDCCGGRGKCYGPQCLCRG or GSRCGPCFTTDPQTQAKCSECCGRKGGVCKGPQCICGIQ or GSRCPP or CFTTNPNMEADCRKCCGGRGYCASYQCICPG or GSCGPCFTTDHNMARKCDECCGGKGRGKCFGPQCLCR or GSVCMPCFTTDQQMARKCSDCCGGKGRGKCYGPQCLCR or GSMCGPCFTTDANMARKCRECCGGIGKCFGPQCLCNRI or GSMCGPCFTTDANMAAACRECCGGIGKCFGPQCLCNRI or GSMCGPCFTTDANMARKCAECCGGIGKCFGPQCLCNRI or GSMCGPCFTTDANMARKCRECCGGIGACFGPQCLCNRI or GSMCGPCFTTDANMARKCRECCGGIGKCFGPQCLCNAI or GSCMPCFTTRPNMAQQCRDCCRGRGKCFGPQCLCGYD or GSMCMPCFTTNLNMEQECRDCCGGTGRCF or GPQCLCGYD or GSCMPCFTTRPNMAQQCRDCCRGRGKCFGPQCLCGYD or MCMPCFTTDHQMARKCDDCCGGKGRGKCYGPQCLCR; note = CONT. FROM ABOVE: MCMPCFTTDHQMARRCDDCCGGRGRGKCYGPQCLCR or MCMPCFTTDHQMARRCDDCCGGRGRGRCYGPQCLCR or MCMPCFTTDHQMARKCDDCCGGRG or RGRCYGPQCLCR or MCMPCFTTDHQMARRCDDCCGGKGRGRCYGPQCLCR or MCMPCFTTHHRMAENCDICCGGDGRGKCYGPQCLCR or MCMPCFTTDTQMQERCDRCCGGGGRGKCWGPQCLCI or MCMPCFTTDTQMQERCDRCCGGGGRGRCWGPQCLCI or MCMPCFTTEQRMAIICDDCCGG or FGRGKCYGPQCLCR or MCMPCFTTEQRMAIICDDCCGGFGRGRCYGPQCLCR or ICIPCFTTDHQIARRCDDCCGGRGRGKCYGPQCICR or ICIPCFTTDHQIARRCDDCCGGRGRGRCYGPQCICR or MCMPCFTTDHRMAENCDICCGGDGRGKCYGPQCLCR or MCMPCFTTDHRMAENCDICC or GGDGRGRCYGPQCLCR or MCMPCFTTEQRMAIICDDCCGGFGRGKCYGPQCLCI or MCMPCFTTEQRMAIICDDCCGGFGRGRCYGPQCLCI or ICIPCFTTDHQIARRCDDCCGGRGRGKCYGPQCICI or ICIPCFTTDHQIARRCDDCCGGRGRGRCYGPQCICI or MCMPCFTTDHRMAENCDI or CCGGDGRGKCYGPQCLCI or MCMPCFTTDHRMAENCDICCGGDGRGRCYGPQCLCI or MCMPCFTTDTQMQEKCDRCCGGGGRGRCWGPQCLCI or MCMPCFTTEQRMAIKCDDCCGGFGRGRCYGPQCLCR or ICIPCFTTDHQIARKCDDCCGGRGRGRCYGPQCICR or MCMPCFTTDHRMAEKC or DICCGGDGRGRCYGPQCLCR or MCMPCFTTDTQMQERCDRCCGGKGRGRCWGPQCLCI; note = CONT. FROM ABOVE: MCMPCFTTEQRMAIICDDCCGGKGRGRCYGPQCLCR or ICIPCFTTDHQIARRCDDCCGGKGRGRCYGPQCICR or MCMPCFTTDHRMAENCDICCGGKGRGRCYGPQCLCR or MCMPCFTTHHRMAE or NCDICCGGDGRGRCYGPQCLCR or MCMPCFTTDTQMQERCDRCCGGGGRGRCWGPQCLC or MCMPCFTTEQRMAIICDDCCGGFGRGRCYGPQCLC or ICIPCFTTDHQIARRCDDCCGGRGRGRCYGPQCIC or MCMPCFTTDHRMAENCDICCGGDGRGRCYGPQCLC or MCMPCFTTDHQMARRC or DDCCGGRGRGRCYGPQCLCI or ACAPCFTTDHQAARRCDDCCGGRGRGKCYGPQCLCR or ACAPCFTTDHQAARKCDDCCGGKGRGKCYGPQCLCR or MCMPCFTTHHRMAENCDICCGGDGRGKCYGPQCLCI or MCMPCFTTHHRMAENCDICCGGDGRGKCYGPQCLC or MCMPCFTTDHQMARR or CDDCCGGRGRGRCYGPQCLC or MCMPCFTTHHQMAENCDICCGGDGRGKCYGPQCLCR or MCMPCFTTHHRMARNCDICCGGDGRGKCYGPQCLCR or MCMPCFTTHHRMAERCDICCGGDGRGKCYGPQCLCR or MCMPCFTTHHRMAENCDDCCGGDGRGKCYGPQCLCR or RCMPCFTTDHQMAR or RCDDCCGGRGRGKCYGPQCLCR or ICIPCFTTDHQIARRCDDCCGGRGRGKCYGPQCLCR or MCLPCFTTDHQLARRCDDCCGGRGRGKCYGPQCLCR or MCMPCFTTEHQMARRCEECCGGRGRGKCYGPQCLCR or MCIPCFTTDHQMARRCEECCGGRGRGKCYGPQCLCR or ICIPCFTTDHQM or ARRCDDCCGGRGDGKCYGPQCLCR; note = CONT. FROM ABOVE: RCMPCFTTDHFMARFCDFCCGGRGRGKCYGPQCLCR or RCMPCFTTDHYMARYCDYCCGGRGRGKCYGPQCLCR or RCMPCFTTDHRMARRCDRCCGGRGRGKCYGPQCLCR or RCMPCFTTDHEMARECDECCGGRGRGKCYGPQCLCR or RCMPCFTTDH or HMARHCDHCCGGRGRGKCYGPQCLCR or LCLPCFTTHHRLADQCDICCGGDGRGKCYGPQCLCR or ICIPCFTTEHQIARRCEECCGGRGRGKCYGPQCLCR or MCMPCFTTIYRMAHECDECCGGRGRGKCYGPQCLCR or MCMPCFTTGYRMAEYCDICCGGRGRGKCYGPQCLCR or MCMPCFTT or HRRMANTCDACCGGRSRGKCYGPQCLCR or HCMPCFTTDHQMIRRCDDCCGGGSYGKCDGPQCLCF or DCMPCFTTDHRMADHCDICCGGDDRGKCYGPQCLCR or MCMPCFTTDHEMERRCDDCCGIGGGGKCHGPQCLCG or MCMPCFTTSEQMFRRCDDCCGGWGDGKCNGPHCLCR or CGPCFT or TDHQMEQKCAECCGGIGKCYGPQCLCNR or RCGPCFTTDPQTQAKCSECCGRKGGVCKGPQCICGIQY or MCMPCFTTDPNMAKKCRDCCGGNGKCFGPQCLCNR or MCMPCFTTDHNMAKKCNDCCGGYGKCFGPQCLCR or RCPPCFTTNPNMEADCRKCCGGRGYCASYQCICPGG or MCMPCFT or TDPNMANKCRDCCGGGKKCFGPQCLCNR or MKFLYGVILIALFLTVMTATLSEARCGPCFTTDPQTQAKCSECCGRKGGVCKGPQCICG IQY or MCMPCFTTRPDMAQQCRACCKGRGKCFGPQCLCGYD or MKFLYGIVFIALFLTVMTATLSDAMCMPCFTTDHNMAKKCRDCCGGNGKCFGPQCLCNR G; note = CONT. FROM ABOVE: MCMPCFTTDHNMAKKCRDCCGGNGKCFGPQCLCNR or MKFLYGIVFITLFLTVMIATHTEAMCMPCFTTRPNMAQQCRDCCRGRGKCFGPQCLCGY D or MKFLYGIVFIALFLTVMIATHTEAMCMPCFTTRPNMAQQCRDCCRGRGKCFGPQCLCGY D or RCKPCFTTDPQMSKKCADCCGGKGKGKCYGPQC or LC or MKFLYGIVFITLFLTVMIATHTEAAMCMPCFTTNLNMEQECRDCCGGTGRCFGPQCLCG YD or RCSPCFTTDQQMTKKCYDCCGGKGKGKCYGPQCICAPY or CGPCFTTDPYTESKCATCCGGRGKCVGPQCLCNRI or TEAMCMPCFTTDHNMAKKCRDCCGGNGKCFGYQCLCNRG or MKF or LYGIVFIALFLTVMFATQTDGCGPCFTTDANMARKCRECCGGIGKCFGPQCLCNRI or MKFLYGIVFIALFLTVMFATQTDGCGPCFTTDANMARKCRECCGGNGKCFGPQCLCNRE or MKFLYGTILIAFFLTVMIATHSEARCPPCFTTNPNMEADCRKCCGGRGYCASYQCICPG G or TEAMCMPCFTTRPDM or AQQCRDCCGGNGKCFGYQCLCNRG or [sequence omitted] G or [sequence omitted] G or MKFLYGIILIALFLTVMIATHSEARCPNCFTTNPNAEADCKKCCGN or RWGKCAGYQCVCPMK or [sequence omitted] GRIVIMYT or MCMPCFTTRPGMAQQCRDCCGGNGKCFGYQCLCNR; note = CONT. FROM ABOVE: MCIPCFTTNPNMAAKCNACCGSRRGSCRGPQCICR or MCIPCFTTNPNMAAKCNACCGSRRGSCRGPQC or ICN or MCIPCFTTNPNMAAKCNACCGGNGSCRGPQCICN or MCIPCFTTNPNMAAKCNACCGSRGRGSCRGPQCICN or MCIPCFTTNPNMAAKCNACCGSRGRGKCRGPQCICN or MCIPCFTTDHQMAAKCNACCGSRRGSCRGPQCICN or MCIPCFTTNHQMAAKCNACCGSRRGSCRGPQCIC or N or MCIPCFTTNPNMARKCNACCGSRGRGSCRGPQCICN or MCIPCFTTNPNMAAKCNACCGGKGRGSCRGPQCICN or MCIPCFTTNPNMAAKCNACCGSRRGSCFGPQCICN or MCIPCFTTNPNMAAKCNACCGSRGRGKCFGPQCICN or MCIPCFTTNPNMAAKCNACCGSRGRGSCFGPQCI or CN or MCIPCFTTNPNMAAKCNACCGSRGRGSCYGPQCICN or MCIPCFTTNPNMAAKCDACCGSRRGSCRGPQCICN or MCIPCFTTNHQMAAKCDACCGSRRGSCRGPQCICN or MCIPCFTTNHNMAAKCDACCGGRGRGSCRGPQCICN or MCIPCFTTNPNMAAKCDACCGSRGRGSCRGPQCI or CN or MCIPCFTTNPNMAAKCDACCGGKGRGSCRGPQCICN or MCIPCFTTNHNMAAKCDACCGSRGRGSCRGPQCICN or MCIPCFTTNPNMAAKCRDCCGGRGSCRGPQCICN or MCMPCFTTNPNMAAKCDDCCGSRGRGSCRGPQCICN or MCIPCFTTNPNMAARCNACCGSRRGSCRGPQCIC or MCIPCFTTNPNMAAKCNACCGSRRGSCRGPQCICI or MCMPCFTTDHQMARACDDCCGGKGRGKCYGPQCLCR; note = CONT. FROM ABOVE: MCMPCFTTDHQMARRCDDCCGGKGRGKCYGPQCLCR or MCMPCFTTDHQMARKCDDCCGGAGRGKCYGPQCLCR or MCMPCFTTDHQMARACDDCCGGAGRGKCYGPQCLC or R or MCMPCFTTDHQMARRCDDCCGGAGRGKCYGPQCLCR or MCMPCFTTDHQMARKCDDCCGGRGRGKCYGPQCLCR or MCMPCFTTDHQMARACDDCCGGRGRGKCYGPQCLCR or MCMPCFTTDHQMARKCDDCCGGKGRGACYGPQCLCR or MCMPCFTTDHQMARACDDCCGGKGRGACYGPQC or LCR or MCMPCFTTDHQMARRCDDCCGGKGRGACYGPQCLCR or MCMPCFTTDHQMARKCDDCCGGAGRGACYGPQCLCR or MCMPCFTTDHQMARACDDCCGGAGRGACYGPQCLCR or MCMPCFTTDHQMARRCDDCCGGAGRGACYGPQCLCR or MCMPCFTTDHQMARKCDDCCGGRGRGACYGP or QCLCR or MCMPCFTTDHQMARACDDCCGGRGRGACYGPQCLCR or MCMPCFTTDHQMARRCDDCCGGRGRGACYGPQCLCR or MCMPCFTTDHQMARKCDDCCGGKGRGRCYGPQCLCR or MCMPCFTTDHQMARACDDCCGGKGRGRCYGPQCLCR or MCMPCFTTDHQMARKCDDCCGGAGRGRCY or GPQCLCR or MCMPCFTTDHQMARACDDCCGGAGRGRCYGPQCLCR or MCMPCFTTDHQMARRCDDCCGGAGRGRCYGPQCLCR or MCMPCFTTDHQMARACDDCCGGRGRGRCYGPQCLCR or KCMPCFTTDHQMARRCDDCCGGRGRGRCYGPQCLCR or ACAPCFTTDHQAARRCDDCCGGRGRGR or CYGPQCLCR or KCAPCFTTDHQAARRCDDCCGGRGRGRCYGPQCLCR; note = CONT. FROM ABOVE: MCMPCFTTDHQMARCDDCCGGGRGKCYGPQCLCR or MCMPCFTTDHQMARCDDCCGGGRGCYGPQCLCR or KCMPCFTTDHQMARCDDCCGGGRGCYGPQCLCR or ACAPCFTTDHQAARCDDCCGGGRGKCYGPQCLC or R or ACAPCFTTDHQAARCDDCCGGGRGCYGPQCLCR or KCAPCFTTDHQAARCDDCCGGGRGCYGPQCLCR or MCMPCFTTDHQMARKCDDCCGGKGRGKCYGPQCLCRGAGAAGG or MCMPCFTTDHQMARACDDCCGGKGRGKCYGPQCLCRGAGAAGG or MCMPCFTTDHQMARRCDDCCGGKGR or GKCYGPQCLCRGAGAAGG or MCMPCFTTDHQMARKCDDCCGGAGRGKCYGPQCLCRGAGAAGG or MCMPCFTTDHQMARACDDCCGGAGRGKCYGPQCLCRGAGAAGG or MCMPCFTTDHQMARRCDDCCGGAGRGKCYGPQCLCRGAGAAGG or MCMPCFTTDHQMARKCDDCCGGRGRGKCYGPQCLCRG or AGAAGG or MCMPCFTTDHQMARACDDCCGGRGRGKCYGPQCLCRGAGAAGG or MCMPCFTTDHQMARRCDDCCGGRGRGKCYGPQCLCRGAGAAGG or MCMPCFTTDHQMARKCDDCCGGKGRGACYGPQCLCRGAGAAGG or MCMPCFTTDHQMARACDDCCGGKGRGACYGPQCLCRGAGAAGG or MCMPCFTTDHQMARRCDDCCGGKGRGACYGPQCLCRGAGAAGG or MCMPCFTTDHQMARKCDDCCGGAGRGACYGPQCLCRGAGAAGG or MCMPCFTTDHQMARACDDCCGGAGRGACYGPQCLCRGAGAAGG or MCMPCFTTDHQMARRCDDCCGGAGRGACYGPQCLCRGAGAAGG or MCMPCFTTDHQM; note = CONT. FROM ABOVE: ARKCDDCCGGRGRGACYGPQCLCRGAGAAGG or MCMPCFTTDHQMARACDDCCGGRGRGACYGPQCLCRGAGAAGG or MCMPCFTTDHQMARRCDDCCGGRGRGACYGPQCLCRGAGAAGG or MCMPCFTTDHQMARKCDDCCGGKGRGRCYGPQCLCRGAGAAGG or MCMPCFTTDHQMARACDDCCGGKG or RGRCYGPQCLCRGAGAAGG or MCMPCFTTDHQMARRCDDCCGGKGRGRCYGPQCLCRGAGAAGG or MCMPCFTTDHQMARKCDDCCGGAGRGRCYGPQCLCRGAGAAGG or MCMPCFTTDHQMARACDDCCGGAGRGRCYGPQCLCRGAGAAGG or MCMPCFTTDHQMARRCDDCCGGAGRGRCYGPQCLCR or GAGAAGG or MCMPCFTTDHQMARKCDDCCGGRGRGRCYGPQCLCRGAGAAGG or MCMPCFTTDHQMARACDDCCGGRGRGRCYGPQCLCRGAGAAGG or MCMPCFTTDHQMARRCDDCCGGRGRGRCYGPQCLCRGAGAAGG or KCMPCFTTDHQMARRCDDCCGGRGRGRCYGPQCLCRGAGAAGG or ACAPCFTTDHQAARRCDDCCGGRGRGRCYGPQCLCRGAGAAGG or KCAPCFTTDHQAARRCDDCCGGRGRGRCYGPQCLCRGAGAAGG or MCMPCFTTDHQMARCDDCCGGGRGKCYGPQCLCRGAGAAGG or MCMPCFTTDHQMARCDDCCGGGRGCYGPQCLCRGAGAAGG or KCMPCFTTDHQMARCD or DCCGGGRGCYGPQCLCRGAGAAGG or ACAPCFTTDHQAARCDDCCGGGRGKCYGPQCLCRGAGAAGG or ACAPCFTTDHQAARCDDCCGGGRGCYGPQCLCRGAGAAGG or KCAPCFTTDHQAARCDDCCGGGRGCYGPQCLCRGAGAAGG; note = CONT. FROM ABOVE: MCMPCFTTDHQMVRKCDDCCGGKGRGKCYGPQCLCR or MCMPCFTTDHQMVRVCDDCCGGKGRGKCYGPQCLCR or MCMPCFTTDHQMVRRCDDCCGGKGRGKCYGPQCLCR or MCMPCFTTDHQMVRKCDDCCGGVGRGKCYGPQCLCR or MCMPCFTTDHQMVRVCDDCCGGVGRGKCYGPQCLCR or MCMPCFTTDHQMVRRCDDCCGGVGRGKCYGPQCLCR or MCMPCFTTDHQMVRKCDDCCGGRGRGKCYGPQCLCR or MCMPCFTTDHQMVRVCDDCCGGRGRGKCYGPQCLCR or MCMPCFTTDHQMVRRCDDCCGGRGRGKCYGPQCLCR or MCMPCFTTDHQMVRKCDDCCGGKGRGVCYGPQCLCR or MCMPCFTTDHQMVRVCDDCCGGKGRGVCYGPQCLC or R or MCMPCFTTDHQMVRRCDDCCGGKGRGVCYGPQCLCR or MCMPCFTTDHQMVRKCDDCCGGVGRGVCYGPQCLCR or MCMPCFTTDHQMVRVCDDCCGGVGRGVCYGPQCLCR or MCMPCFTTDHQMVRRCDDCCGGVGRGVCYGPQCLCR or MCMPCFTTDHQMVRKCDDCCGGRGRGVCYGPQC or LCR or MCMPCFTTDHQMVRVCDDCCGGRGRGVCYGPQCLCR or MCMPCFTTDHQMVRRCDDCCGGRGRGVCYGPQCLCR or MCMPCFTTDHQMVRKCDDCCGGKGRGRCYGPQCLCR or MCMPCFTTDHQMVRVCDDCCGGKGRGRCYGPQCLCR or MCMPCFTTDHQMVRRCDDCCGGKGRGRCYGP or QCLCR or MCMPCFTTDHQMVRKCDDCCGGVGRGRCYGPQCLCR or MCMPCFTTDHQMVRVCDDCCGGVGRGRCYGPQCLCR or MCMPCFTTDHQMVRRCDDCCGGVGRGRCYGPQCLCR; note = CONT. FROM ABOVE: MCMPCFTTDHQMVRKCDDCCGGRGRGRCYGPQCLCR or MCMPCFTTDHQMVRVCDDCCGGRGRGRCY or GPQCLCR or MCMPCFTTDHQMVRRCDDCCGGRGRGRCYGPQCLCR or KCMPCFTTDHQMVRRCDDCCGGRGRGRCYGPQCLCR or VCVPCFTTDHQVVRRCDDCCGGRGRGRCYGPQCLCR or KCVPCFTTDHQVVRRCDDCCGGRGRGRCYGPQCLCR or MCMPCFTTDHQMVRCDDCCGGGRGKCY or GPQCLCR or MCMPCFTTDHQMVRCDDCCGGGRGCYGPQCLCR or KCMPCFTTDHQMVRCDDCCGGGRGCYGPQCLCR or VCVPCFTTDHQVVRCDDCCGGGRGKCYGPQCLCR or VCVPCFTTDHQVVRCDDCCGGGRGCYGPQCLCR or KCVPCFTTDHQVVRCDDCCGGGRGCYGPQCLCR or MCMPCFTTDHQMVRKCDDCCGGKGRGKCYGPQCLCRGAGAAGG or MCMPCFTTDHQMVRVCDDCCGGKGRGKCYGPQCLCRGAGAAGG or MCMPCFTTDHQMVRRCDDCCGGKGRGKCYGPQCLCRGAGAAGG or MCMPCFTTDHQMVRKCDDCCGGVGRGKCYGPQCLCRGAGAAGG or MCMPCFTTDHQ or MVRVCDDCCGGVGRGKCYGPQCLCRGAGAAGG or MCMPCFTTDHQMVRRCDDCCGGVGRGKCYGPQCLCRGAGAAGG or MCMPCFTTDHQMVRKCDDCCGGRGRGKCYGPQCLCRGAGAAGG or MCMPCFTTDHQMVRVCDDCCGGRGRGKCYGPQCLCRGAGAAGG or MCMPCFTTDHQMVRRCDDCCGGR or GRGKCYGPQCLCRGAGAAGG or MCMPCFTTDHQMVRKCDDCCGGKGRGVCYGPQCLCRGAGAAGG; note = CONT. FROM ABOVE: MCMPCFTTDHQMVRVCDDCCGGKGRGVCYGPQCLCRGAGAAGG or MCMPCFTTDHQMVRRCDDCCGGKGRGVCYGPQCLCRGAGAAGG or MCMPCFTTDHQMVRKCDDCCGGVGRGVCYGPQCLC or RGAGAAGG or MCMPCFTTDHQMVRVCDDCCGGVGRGVCYGPQCLCRGAGAAGG or MCMPCFTTDHQMVRRCDDCCGGVGRGVCYGPQCLCRGAGAAGG or MCMPCFTTDHQMVRKCDDCCGGRGRGVCYGPQCLCRGAGAAGG or MCMPCFTTDHQMVRVCDDCCGGRGRGVCYGPQCLCRGAGAAGG or MCMPCFTTDHQMVRRCDDCCGGRGRGVCYGPQCLCRGAGAAGG or MCMPCFTTDHQMVRKCDDCCGGKGRGRCYGPQCLCRGAGAAGG or MCMPCFTTDHQMVRVCDDCCGGKGRGRCYGPQCLCRGAGAAGG or MCMPCFTTDHQMVRRCDDCCGGKGRGRCYGPQCLCRGAGAAGG or MCMPCFTTDH or QMVRKCDDCCGGVGRGRCYGPQCLCRGAGAAGG or MCMPCFTTDHQMVRVCDDCCGGVGRGRCYGPQCLCRGAGAAGG or MCMPCFTTDHQMVRRCDDCCGGVGRGRCYGPQCLCRGAGAAGG or MCMPCFTTDHQMVRKCDDCCGGRGRGRCYGPQCLCRGAGAAGG or MCMPCFTTDHQMVRVCDDCCGG or RGRGRCYGPQCLCRGAGAAGG or MCMPCFTTDHQMVRRCDDCCGGRGRGRCYGPQCLCRGAGAAGG or KCMPCFTTDHQMVRRCDDCCGGRGRGRCYGPQCLCRGAGAAGG or VCVPCFTTDHQVVRRCDDCCGGRGRGRCYGPQCLCRGAGAAGG or KCVPCFTTDHQVVRRCDDCCGGRGRGRCYGPQCL or CRGAGAAGG; note = CONT. FROM ABOVE: MCMPCFTTDHQMVRCDDCCGGGRGKCYGPQCLCRGAGAAGG or MCMPCFTTDHQMVRCDDCCGGGRGCYGPQCLCRGAGAAGG or KCMPCFTTDHQMVRCDDCCGGGRGCYGPQCLCRGAGAAGG or VCVPCFTTDHQVVRCDDCCGGGRGKCYGPQCLCRGAGAAGG or VCVPCFT or TDHQVVRCDDCCGGGRGCYGPQCLCRGAGAAGG or KCVPCFTTDHQVVRCDDCCGGGRGCYGPQCLCRGAGAAGG or MCMPCFTTDHQMLRKCDDCCGGKGRGKCYGPQCLCR or MCMPCFTTDHQMLRLCDDCCGGKGRGKCYGPQCLCR or MCMPCFTTDHQMLRRCDDCCGGKGRGKCYGPQCLCR or MCMPCFTTDHQMLRKCDDCCGGLGRGKCYGPQCLCR or MCMPCFTTDHQMLRLCDDCCGGLGRGKCYGPQCLCR or MCMPCFTTDHQMLRRCDDCCGGLGRGKCYGPQCLCR or MCMPCFTTDHQMLRKCDDCCGGRGRGKCYGPQCLCR or MCMPCFTTDHQMLRLCDDCCGGRGRGKCYGPQCLCR or MCMPCFTTDHQMLRRCDDCCGGRGRGKCYGPQCLCR or MCMPCFTTDHQMLRKCDDCCGGKGRGLCYGPQCLCR or MCMPCFTTDHQMLRLCDDCCGGKGRGLCYGPQCLCR or MCMPCFTTDHQMLRRCDDCCGGKGRGLCYGPQCLCR or MCMPCFTTDHQMLRKCDDCCGGLGRGLCYGPQCLC or R or MCMPCFTTDHQMLRLCDDCCGGLGRGLCYGPQCLCR or MCMPCFTTDHQMLRRCDDCCGGLGRGLCYGPQCLCR or MCMPCFTTDHQMLRKCDDCCGGRGRGLCYGPQCLCR or MCMPCFTTDHQMLRLCDDCCGGRGRGLCYGPQCLCR; note = CONT. FROM ABOVE: MCMPCFTTDHQMLRRCDDCCGGRGRGLCYGPQC or LCR or MCMPCFTTDHQMLRKCDDCCGGKGRGRCYGPQCLCR or MCMPCFTTDHQMLRLCDDCCGGKGRGRCYGPQCLCR or MCMPCFTTDHQMLRRCDDCCGGKGRGRCYGPQCLCR or MCMPCFTTDHQMLRKCDDCCGGLGRGRCYGPQCLCR or MCMPCFTTDHQMLRLCDDCCGGLGRGRCYGP or QCLCR or MCMPCFTTDHQMLRRCDDCCGGLGRGRCYGPQCLCR or MCMPCFTTDHQMLRKCDDCCGGRGRGRCYGPQCLCR or MCMPCFTTDHQMLRLCDDCCGGRGRGRCYGPQCLCR or MCMPCFTTDHQMLRRCDDCCGGRGRGRCYGPQCLCR or KCMPCFTTDHQMLRRCDDCCGGRGRGRCY or GPQCLCR or LCLPCFTTDHQLLRRCDDCCGGRGRGRCYGPQCLCR or KCLPCFTTDHQLLRRCDDCCGGRGRGRCYGPQCLCR or MCMPCFTTDHQMLRCDDCCGGGRGKCYGPQCLCR or MCMPCFTTDHQMLRCDDCCGGGRGCYGPQCLCR or KCMPCFTTDHQMLRCDDCCGGGRGCYGPQCLC or R or LCLPCFTTDHQLLRCDDCCGGGRGKCYGPQCLCR or LCLPCFTTDHQLLRCDDCCGGGRGCYGPQCLCR or KCLPCFTTDHQLLRCDDCCGGGRGCYGPQCLCR or MCMPCFTTDHQMLRKCDDCCGGKGRGKCYGPQCLCRGAGAAGG or MCMPCFTTDHQMLRLCDDCCGGKGRGKCYGPQCL or CRGAGAAGG or MCMPCFTTDHQMLRRCDDCCGGKGRGKCYGPQCLCRGAGAAGG or MCMPCFTTDHQMLRKCDDCCGGLGRGKCYGPQCLCRGAGAAGG; note = CONT. FROM ABOVE: MCMPCFTTDHQMLRLCDDCCGGLGRGKCYGPQCLCRGAGAAGG or MCMPCFTTDHQMLRRCDDCCGGLGRGKCYGPQCLCRGAGAAGG or MCMPCFTTDHQMLRKCDDCCGGRGRGKCYGPQCLCRGAGAAGG or MCMPCFTTDHQMLRLCDDCCGGRGRGKCYGPQCLCRGAGAAGG or MCMPCFTTDHQMLRRCDDCCGGRGRGKCYGPQCLCRGAGAAGG or MCMPCFTTDHQMLRKCDDCCGGKGRGLCYGPQCLCRGAGAAGG or MCMPCFTTD or HQMLRLCDDCCGGKGRGLCYGPQCLCRGAGAAGG or MCMPCFTTDHQMLRRCDDCCGGKGRGLCYGPQCLCRGAGAAGG or MCMPCFTTDHQMLRKCDDCCGGLGRGLCYGPQCLCRGAGAAGG or MCMPCFTTDHQMLRLCDDCCGGLGRGLCYGPQCLCRGAGAAGG or MCMPCFTTDHQMLRRCDDCCG or GLGRGLCYGPQCLCRGAGAAGG or MCMPCFTTDHQMLRKCDDCCGGRGRGLCYGPQCLCRGAGAAGG or MCMPCFTTDHQMLRLCDDCCGGRGRGLCYGPQCLCRGAGAAGG or MCMPCFTTDHQMLRRCDDCCGGRGRGLCYGPQCLCRGAGAAGG or MCMPCFTTDHQMLRKCDDCCGGKGRGRCYGPQC or LCRGAGAAGG or MCMPCFTTDHQMLRLCDDCCGGKGRGRCYGPQCLCRGAGAAGG or MCMPCFTTDHQMLRRCDDCCGGKGRGRCYGPQCLCRGAGAAGG or MCMPCFTTDHQMLRKCDDCCGGLGRGRCYGPQCLCRGAGAAGG or MCMPCFTTDHQMLRLCDDCCGGLGRGRCYGPQCLCRGAGAAGG or MCMPCFTTDHQMLRRCDDCCGGLGRGRCYGPQCLCRGAGAAGG; note = CONT. FROM ABOVE: MCMPCFTTDHQMLRKCDDCCGGRGRGRCYGPQCLCRGAGAAGG or MCMPCFTTDHQMLRLCDDCCGGRGRGRCYGPQCLCRGAGAAGG or MCMPCFTTDHQMLRRCDDCCGGRGRGRCYGPQCLCRGAGAAGG or KCMPCFTT or DHQMLRRCDDCCGGRGRGRCYGPQCLCRGAGAAGG or LCLPCFTTDHQLLRRCDDCCGGRGRGRCYGPQCLCRGAGAAGG or KCLPCFTTDHQLLRRCDDCCGGRGRGRCYGPQCLCRGAGAAGG or MCMPCFTTDHQMLRCDDCCGGGRGKCYGPQCLCRGAGAAGG or MCMPCFTTDHQMLRCDDCCGGG or RGCYGPQCLCRGAGAAGG or KCMPCFTTDHQMLRCDDCCGGGRGCYGPQCLCRGAGAAGG or LCLPCFTTDHQLLRCDDCCGGGRGKCYGPQCLCRGAGAAGG or LCLPCFTTDHQLLRCDDCCGGGRGCYGPQCLCRGAGAAGG or KCLPCFTTDHQLLRCDDCCGGGRGCYGPQCLCRGAGAAGG or GCGPCFTTDHQGARKCDDCCGGKGRGKCYGPQCLCR or GCGPCFTTDHQGARACDDCCGGKGRGKCYGPQCLCR or GCGPCFTTDHQGARRCDDCCGGKGRGKCYGPQCLCR or GCGPCFTTDHQGARKCDDCCGGAGRGKCYGPQCLCR or GCGPCFTTDHQGARACDDCCGGAGRGKCYGPQCLCR or GCGPCFTTDHQGARRCDDCCGGAGRGKCYGPQCLCR or GCGPCFTTDHQGARKCDDCCGGRGRGKCYGPQCLCR or GCGPCFTTDHQGARACDDCCGGRGRGKCYGPQCLCR or GCGPCFTTDHQGARRCDDCCGGRGRGKCYGPQCLCR or GCGPCFTTDHQGARKCDDCCGGKGRGACYGPQCLCR; note = CONT. FROM ABOVE: GCGPCFTTDHQGARACDDCCGGKGRGACYGPQCLCR or GCGPCFTTDHQGARRCDDCCGGKGRGACYGPQCLCR or GCGPCFTTDHQGARKCDDCCGGAGRGACYGPQCLCR or GCGPCFTTDHQGARACDDCCGGAGRGACYGPQCLCR or GCGPCFTTDHQGARRCDDCCGGAGRGACYGPQCLCR or GCGPCFTTDHQGARKCDDCCGGRGRGACYGPQCLCR or GCGPCFTTDHQGARACDDCCGGRGRGACYGPQCLCR or GCGPCFTTDHQGARRCDDCCGGRGRGACYGPQCLCR or GCGPCFTTDHQGARKCDDCCGGKGRGRCYGPQCLCR or GCGPCFTTDHQGARACDDCCGGKGRGRCYGPQCL or CR or GCGPCFTTDHQGARRCDDCCGGKGRGRCYGPQCLCR or GCGPCFTTDHQGARKCDDCCGGAGRGRCYGPQCLCR or GCGPCFTTDHQGARACDDCCGGAGRGRCYGPQCLCR or GCGPCFTTDHQGARRCDDCCGGAGRGRCYGPQCLCR or GCGPCFTTDHQGARKCDDCCGGRGRGRCYGPQ or CLCR or GCGPCFTTDHQGARACDDCCGGRGRGRCYGPQCLCR or GCGPCFTTDHQGARRCDDCCGGRGRGRCYGPQCLCR or KCGPCFTTDHQGARRCDDCCGGRGRGRCYGPQCLCR or GCGPCFTTDHQGARCDDCCGGGRGKCYGPQCLCR or GCGPCFTTDHQGARCDDCCGGGRGCYGPQCLC or R or KCGPCFTTDHQGARCDDCCGGGRGCYGPQCLCR or ACAPCFTTDHQAARACDDCCGGKGRGKCYGPQCLCR or ACAPCFTTDHQAARRCDDCCGGKGRGKCYGPQCLCR or ACAPCFTTDHQAARKCDDCCGGAGRGKCYGPQCLCR; note = CONT. FROM ABOVE: ACAPCFTTDHQAARACDDCCGGAGRGKCYGPQCLCR or ACAPCFTTDHQAARRCDDCCGGAGRGKCYGPQCLCR or ACAPCFTTDHQAARKCDDCCGGRGRGKCYGPQCLCR or ACAPCFTTDHQAARACDDCCGGRGRGKCYGPQCLCR or ACAPCFTTDHQAARKCDDCCGGKGRGACYGPQCLCR or ACAPCFTTDHQAARACDDCCGGKGRGACYGPQCL or CR or ACAPCFTTDHQAARRCDDCCGGKGRGACYGPQCLCR or ACAPCFTTDHQAARKCDDCCGGAGRGACYGPQCLCR or ACAPCFTTDHQAARACDDCCGGAGRGACYGPQCLCR or ACAPCFTTDHQAARRCDDCCGGAGRGACYGPQCLCR or ACAPCFTTDHQAARKCDDCCGGRGRGACYGPQ or CLCR or ACAPCFTTDHQAARACDDCCGGRGRGACYGPQCLCR or ACAPCFTTDHQAARRCDDCCGGRGRGACYGPQCLCR or ACAPCFTTDHQAARKCDDCCGGKGRGRCYGPQCLCR or ACAPCFTTDHQAARACDDCCGGKGRGRCYGPQCLCR or ACAPCFTTDHQAARRCDDCCGGKGRGRCYG or PQCLCR or ACAPCFTTDHQAARKCDDCCGGAGRGRCYGPQCLCR or ACAPCFTTDHQAARACDDCCGGAGRGRCYGPQCLCR or ACAPCFTTDHQAARRCDDCCGGAGRGRCYGPQCLCR or ACAPCFTTDHQAARKCDDCCGGRGRGRCYGPQCLCR or ACAPCFTTDHQAARACDDCCGGRGRGRC or YGPQCLCR or ICIPCFTTDHQIARKCDDCCGGKGRGKCYGPQCLCR or ICIPCFTTDHQIARACDDCCGGKGRGKCYGPQCLCR or ICIPCFTTDHQIARRCDDCCGGKGRGKCYGPQCLCR; note = CONT. FROM ABOVE: ICIPCFTTDHQIARKCDDCCGGAGRGKCYGPQCLCR or ICIPCFTTDHQIARACDDCCGGAGRG or KCYGPQCLCR or ICIPCFTTDHQIARRCDDCCGGAGRGKCYGPQCLCR or ICIPCFTTDHQIARKCDDCCGGRGRGKCYGPQCLCR or ICIPCFTTDHQIARACDDCCGGRGRGKCYGPQCLCR or ICIPCFTTDHQIARKCDDCCGGKGRGACYGPQCLCR or ICIPCFTTDHQIARACDDCCGGKG or RGACYGPQCLCR or ICIPCFTTDHQIARRCDDCCGGKGRGACYGPQCLCR or ICIPCFTTDHQIARKCDDCCGGAGRGACYGPQCLCR or ICIPCFTTDHQIARACDDCCGGAGRGACYGPQCLCR or ICIPCFTTDHQIARRCDDCCGGAGRGACYGPQCLCR or ICIPCFTTDHQIARKCDDCCGG or RGRGACYGPQCLCR or ICIPCFTTDHQIARACDDCCGGRGRGACYGPQCLCR or ICIPCFTTDHQIARRCDDCCGGRGRGACYGPQCLCR or ICIPCFTTDHQIARKCDDCCGGKGRGRCYGPQCLCR or ICIPCFTTDHQIARACDDCCGGKGRGRCYGPQCLCR or ICIPCFTTDHQIARRCDDCC or GGKGRGRCYGPQCLCR or ICIPCFTTDHQIARKCDDCCGGAGRGRCYGPQCLCR or ICIPCFTTDHQIARACDDCCGGAGRGRCYGPQCLCR or ICIPCFTTDHQIARRCDDCCGGAGRGRCYGPQCLCR or ICIPCFTTDHQIARKCDDCCGGRGRGRCYGPQCLCR or ICIPCFTTDHQIARACDD or CCGGRGRGRCYGPQCLCR or ICIPCFTTDHQIARRCDDCCGGRGRGRCYGPQCLCR or KCIPCFTTDHQIARRCDDCCGGRGRGRCYGPQCLCR; note = CONT. FROM ABOVE: ICIPCFTTDHQIARCDDCCGGGRGKCYGPQCLCR or ICIPCFTTDHQIARCDDCCGGGRGCYGPQCLCR or KCIPCFTTDHQIARCDDCCGG or GRGCYGPQCLCR or TCTPCFTTDHQTARKCDDCCGGKGRGKCYGPQCLCR or TCTPCFTTDHQTARACDDCCGGKGRGKCYGPQCLCR or TCTPCFTTDHQTARRCDDCCGGKGRGKCYGPQCLCR or TCTPCFTTDHQTARKCDDCCGGAGRGKCYGPQCLCR or TCTPCFTTDHQTARACDDCCGG or AGRGKCYGPQCLCR or TCTPCFTTDHQTARRCDDCCGGAGRGKCYGPQCLCR or TCTPCFTTDHQTARKCDDCCGGRGRGKCYGPQCLCR or TCTPCFTTDHQTARACDDCCGGRGRGKCYGPQCLCR or TCTPCFTTDHQTARRCDDCCGGRGRGKCYGPQCLCR or TCTPCFTTDHQTARKCDDCC or GGKGRGACYGPQCLCR or TCTPCFTTDHQTARACDDCCGGKGRGACYGPQCLCR or TCTPCFTTDHQTARRCDDCCGGKGRGACYGPQCLCR or TCTPCFTTDHQTARKCDDCCGGAGRGACYGPQCLCR or TCTPCFTTDHQTARACDDCCGGAGRGACYGPQCLCR or TCTPCFTTDHQTARRCDD or CCGGAGRGACYGPQCLCR or TCTPCFTTDHQTARKCDDCCGGRGRGACYGPQCLCR or TCTPCFTTDHQTARACDDCCGGRGRGACYGPQCLCR or TCTPCFTTDHQTARRCDDCCGGRGRGACYGPQCLCR or TCTPCFTTDHQTARKCDDCCGGKGRGRCYGPQCLCR or TCTPCFTTDHQTARAC or DDCCGGKGRGRCYGPQCLCR or TCTPCFTTDHQTARRCDDCCGGKGRGRCYGPQCLCR; note = CONT. FROM ABOVE: TCTPCFTTDHQTARKCDDCCGGAGRGRCYGPQCLCR or TCTPCFTTDHQTARACDDCCGGAGRGRCYGPQCLCR or TCTPCFTTDHQTARRCDDCCGGAGRGRCYGPQCLCR or TCTPCFTTDHQTAR or KCDDCCGGRGRGRCYGPQCLCR or TCTPCFTTDHQTARACDDCCGGRGRGRCYGPQCLCR or TCTPCFTTDHQTARRCDDCCGGRGRGRCYGPQCLCR or KCTPCFTTDHQTARRCDDCCGGRGRGRCYGPQCLCR or TCTPCFTTDHQTARCDDCCGGGRGKCYGPQCLCR or TCTPCFTTDHQTAR or CDDCCGGGRGCYGPQCLCR or KCTPCFTTDHQTARCDDCCGGGRGCYGPQCLCR or VCVPCFTTDHQVARKCDDCCGGKGRGKCYGPQCLCR or VCVPCFTTDHQVARACDDCCGGKGRGKCYGPQCLCR or VCVPCFTTDHQVARRCDDCCGGKGRGKCYGPQCLCR or VCVPCFTTDHQVARKCDD or CCGGAGRGKCYGPQCLCR or VCVPCFTTDHQVARACDDCCGGAGRGKCYGPQCLCR or VCVPCFTTDHQVARRCDDCCGGAGRGKCYGPQCLCR or VCVPCFTTDHQVARKCDDCCGGRGRGKCYGPQCLCR or VCVPCFTTDHQVARACDDCCGGRGRGKCYGPQCLCR or VCVPCFTTDHQVARRC or DDCCGGRGRGKCYGPQCLCR or VCVPCFTTDHQVARKCDDCCGGKGRGACYGPQCLCR or VCVPCFTTDHQVARACDDCCGGKGRGACYGPQCLCR or VCVPCFTTDHQVARRCDDCCGGKGRGACYGPQCLCR or VCVPCFTTDHQVARKCDDCCGGAGRGACYGPQCLCR or VCVPCFTTDHQVAR or ACDDCCGGAGRGACYGPQCLCR; note = CONT. FROM ABOVE: VCVPCFTTDHQVARRCDDCCGGAGRGACYGPQCLCR or VCVPCFTTDHQVARKCDDCCGGRGRGACYGPQCLCR or VCVPCFTTDHQVARACDDCCGGRGRGACYGPQCLCR or VCVPCFTTDHQVARRCDDCCGGRGRGACYGPQCLCR or VCVPCFTTDHQV or ARKCDDCCGGKGRGRCYGPQCLCR or VCVPCFTTDHQVARACDDCCGGKGRGRCYGPQCLCR or VCVPCFTTDHQVARRCDDCCGGKGRGRCYGPQCLCR or VCVPCFTTDHQVARKCDDCCGGAGRGRCYGPQCLCR or VCVPCFTTDHQVARACDDCCGGAGRGRCYGPQCLCR or VCVPCFTTDH or QVARRCDDCCGGAGRGRCYGPQCLCR or VCVPCFTTDHQVARKCDDCCGGRGRGRCYGPQCLCR or VCVPCFTTDHQVARACDDCCGGRGRGRCYGPQCLCR or VCVPCFTTDHQVARRCDDCCGGRGRGRCYGPQCLCR or KCVPCFTTDHQVARRCDDCCGGRGRGRCYGPQCLCR or VCVPCFTT or DHQVARCDDCCGGGRGKCYGPQCLCR or VCVPCFTTDHQVARCDDCCGGGRGCYGPQCLCR or KCVPCFTTDHQVARCDDCCGGGRGCYGPQCLCR or LCLPCFTTDHQLARKCDDCCGGKGRGKCYGPQCLCR or LCLPCFTTDHQLARACDDCCGGKGRGKCYGPQCLCR or LCLPCFTTDHQLAR or RCDDCCGGKGRGKCYGPQCLCR or LCLPCFTTDHQLARKCDDCCGGAGRGKCYGPQCLCR or LCLPCFTTDHQLARACDDCCGGAGRGKCYGPQCLCR or LCLPCFTTDHQLARRCDDCCGGAGRGKCYGPQCLCR or LCLPCFTTDHQLARKCDDCCGGRGRGKCYGPQCLCR or LCLPCFTTDHQL; note = CONT. FROM ABOVE: ARACDDCCGGRGRGKCYGPQCLCR or LCLPCFTTDHQLARRCDDCCGGRGRGKCYGPQCLCR or LCLPCFTTDHQLARKCDDCCGGKGRGACYGPQCLCR or LCLPCFTTDHQLARACDDCCGGKGRGACYGPQCLCR or LCLPCFTTDHQLARRCDDCCGGKGRGACYGPQCLCR or LCLPCFTTDH or QLARKCDDCCGGAGRGACYGPQCLCR or LCLPCFTTDHQLARACDDCCGGAGRGACYGPQCLCR or LCLPCFTTDHQLARRCDDCCGGAGRGACYGPQCLCR or LCLPCFTTDHQLARKCDDCCGGRGRGACYGPQCLCR or LCLPCFTTDHQLARACDDCCGGRGRGACYGPQCLCR or LCLPCFTT or DHQLARRCDDCCGGRGRGACYGPQCLCR or LCLPCFTTDHQLARKCDDCCGGKGRGRCYGPQCLCR or LCLPCFTTDHQLARACDDCCGGKGRGRCYGPQCLCR or LCLPCFTTDHQLARRCDDCCGGKGRGRCYGPQCLCR or LCLPCFTTDHQLARKCDDCCGGAGRGRCYGPQCLCR or LCLPCF or TTDHQLARACDDCCGGAGRGRCYGPQCLCR or LCLPCFTTDHQLARRCDDCCGGAGRGRCYGPQCLCR or LCLPCFTTDHQLARKCDDCCGGRGRGRCYGPQCLCR or LCLPCFTTDHQLARACDDCCGGRGRGRCYGPQCLCR or LCLPCFTTDHQLARRCDDCCGGRGRGRCYGPQCLCR or KCLP or CFTTDHQLARRCDDCCGGRGRGRCYGPQCLCR or LCLPCFTTDHQLARCDDCCGGGRGKCYGPQCLCR or LCLPCFTTDHQLARCDDCCGGGRGCYGPQCLCR or KCLPCFTTDHQLARCDDCCGGGRGCYGPQCLCR; note = CONT. FROM ABOVE: SCSPCFTTDHQSARKCDDCCGGKGRGKCYGPQCLCR or SCSPCFTTDH or QSARACDDCCGGKGRGKCYGPQCLCR or SCSPCFTTDHQSARRCDDCCGGKGRGKCYGPQCLCR or SCSPCFTTDHQSARKCDDCCGGAGRGKCYGPQCLCR or SCSPCFTTDHQSARACDDCCGGAGRGKCYGPQCLCR or SCSPCFTTDHQSARRCDDCCGGAGRGKCYGPQCLCR or SCSPCFTT or DHQSARKCDDCCGGRGRGKCYGPQCLCR or SCSPCFTTDHQSARACDDCCGGRGRGKCYGPQCLCR or SCSPCFTTDHQSARRCDDCCGGRGRGKCYGPQCLCR or SCSPCFTTDHQSARKCDDCCGGKGRGACYGPQCLCR or SCSPCFTTDHQSARACDDCCGGKGRGACYGPQCLCR or SCSPCF or TTDHQSARRCDDCCGGKGRGACYGPQCLCR or SCSPCFTTDHQSARKCDDCCGGAGRGACYGPQCLCR or SCSPCFTTDHQSARACDDCCGGAGRGACYGPQCLCR or SCSPCFTTDHQSARRCDDCCGGAGRGACYGPQCLCR or SCSPCFTTDHQSARKCDDCCGGRGRGACYGPQCLCR or SCSP or CFTTDHQSARACDDCCGGRGRGACYGPQCLCR or SCSPCFTTDHQSARRCDDCCGGRGRGACYGPQCLCR or SCSPCFTTDHQSARKCDDCCGGKGRGRCYGPQCLCR or SCSPCFTTDHQSARACDDCCGGKGRGRCYGPQCLCR or SCSPCFTTDHQSARRCDDCCGGKGRGRCYGPQCLCR or SC or SPCFTTDHQSARKCDDCCGGAGRGRCYGPQCLCR or SCSPCFTTDHQSARACDDCCGGAGRGRCYGPQCLCR or SCSPCFTTDHQSARRCDDCCGGAGRGRCYGPQCLCR; note = CONT. FROM ABOVE: SCSPCFTTDHQSARKCDDCCGGRGRGRCYGPQCLCR or SCSPCFTTDHQSARACDDCCGGRGRGRCYGPQCLCR or SCSPCFTTDHQSARRCDDCCGGRGRGRCYGPQCLCR or KCSPCFTTDHQSARRCDDCCGGRGRGRCYGPQCLCR or SCSPCFTTDHQSARCDDCCGGGRGKCYGPQCLCR or SCSPCFTTDHQSARCDDCCGGGRGCYGPQCLCR or KCSPCFTTDHQSARCDDCCGGGRGCYGPQCLCR or MCMPCF or TTDPNMARKCRDCCGGNGKCFGPQCLCNRG or MCMPCFTTDHNMAKKCRDCCGGNGKCFGYQCLCNRG or MCMPCFTTDHQTARRCRDCCGGRGRKCFGQCLCGYD or ACGPCFTTDPQMAEKCSDCCGGIGTCYGPQCLCNRL or MCMPCFTTRPNMAQQCRDCCRGRGKCFGPQCLCG or MCMPCF or TTRPNMAQQCRDCCRGRGKCFGPQCLCGYD or MCMPCFTTNLNMEQECRDCCGGTGRCFGPQCLCG or GCMPCFTTDRYMARKCKECCRGYGNCFGPQCLCNRG or GCGPCFTTDANMARKCRECCGGNGKCFGPQCLCNRE or GCGPCFTTDANMARKCRECCGGIGKCFGPQCLCNRI or MCMPCF or TTRPDMAQQCRACCKGRGKCFGPQCLCG or MCIPCFTTNPNMAAKCNACCGSRRGSCRGPQCIC or [sequence omitted] or CGPCFTTDPYTESKCATCCGGRGKCVGPQCLCNR or RCGPCFTTDPQTQAKCSECCGRKGGVCKGPQCICG or CGPCFTKDPETE or KKCATCCGGIGRCFGPQCLCNRG or MCMPCFTTDHQMARRCDDCCGGRGRGKCWGPQCLCR; note = CONT. FROM ABOVE: AMCMPCFTTDHNMAKKCRDCCGGNGKCFGPQCLCNRG or CGPCFTTDWESEKKCAECCGGIGRCFGPQCLCNRK or CGPCFTTDHQTEQKCAECCGGIGKCYGPQCLCRG or CGPCFTTDRQMEQ or KCAECCGGIGKCYGPQCLCRG or CGPCFTTDHQTEQKCAECCGGIGKCYGPQCLC or CMPCFTTDHQMARKCDDCCGGRGKCYGPQCLCRG or RCGPCFTTDPQTQAKCSECCGRKGGVCKGPQCICGIQ or RCPPCFTTNPNMEADCRKCCGGRGYCASYQCICPG or CGPCFTTDHNMARKCDECC or GGKGRGKCFGPQCLCR or VCMPCFTTDQQMARKCSDCCGGKGRGKCYGPQCLCR or MCGPCFTTDANMARKCRECCGGIGKCFGPQCLCNRI or MCGPCFTTDANMAAACRECCGGIGKCFGPQCLCNRI or MCGPCFTTDANMARKCAECCGGIGKCFGPQCLCNRI or MCGPCFTTDANMARKCRE or CCGGIGACFGPQCLCNRI or MCGPCFTTDANMARKCRECCGGIGKCFGPQCLCNAI or CMPCFTTRPNMAQQCRDCCRGRGKCFGPQCLCGYD or MCMPCFTTNLNMEQECRDCCGGTGRCFGPQCLCGYD or CMPCFTTRPNMAQQCRDCCRGRGKCFGPQCLCGYD or GSEISCEPGKTFKDKCNT or CRCGADGKSAACTLKACPNQ or GSSCEPGRTFRDRCNTCRCGADGRSAACTLRACPNQ or GSSCEPGRTFRDRCNTCKCGADGRSAACTLRACPNQ or GSSCEPGTTFRDRCNTCRCGSDGRSAACTLRACPQ or GSSCTPGTTFRDRCNTCRCSSNGRSAACTLRACPPGSY or GSSCTPGTTFRNR or CNTCRCGSNGRSASCTLMACPPGSY; note = CONT. FROM ABOVE: GSSCTPGATFRNRCNTCRCGSNGRSASCTLMACPPGSY or GSSCQPGTTYQRGCNTCRCLEDGQTEACTLRLC or GSSCTPGATYREGCNICRCRSDGRSGACTRRICPVDSN or GSSCQPGTTFRRDCNTCVCNRDGTNAACTLRACL or EISCEPGKTF or KDKCNTCRCGADGKSAACTLKACPNQ or SCEPGRTFRDRCNTCRCGADGRSAACTLRACPNQ or SCEPGRTFRDRCNTCKCGADGRSAACTLRACPNQ or SCEPGTTFRDRCNTCRCGSDGRSAACTLRACPQ or SCTPGTTFRDRCNTCRCSSNGRSAACTLRACPPGSY or SCTPGTTFRNRCNTC or RCGSNGRSASCTLMACPPGSY or SCTPGATFRNRCNTCRCGSNGRSASCTLMACPPGSY or SCQPGTTYQRGCNTCRCLEDGQTEACTLRLC or SCTPGATYREGCNICRCRSDGRSGACTRRICPVDSN or SCQPGTTFRRDCNTCVCNRDGTNAACTLRACL or GSMCMPCFTTDHQMARKCDDCCGGKGRGKCYGPQCLCR or GSACMPCFTTDHQMARKCDDCCGGKGRGKCYGPQCLCR or GSMCAPCFTTDHQMARKCDDCCGGKGRGKCYGPQCLCR or GSMCMACFTTDHQMARKCDDCCGGKGRGKCYGPQCLCR or GSMCMPCATTDHQMARKCDDCCGGKGRGKC or YGPQCLCR or GSMCMPCFATDHQMARKCDDCCGGKGRGKCYGPQCLCR or GSMCMPCFTADHQMARKCDDCCGGKGRGKCYGPQCLCR or GSMCMPCFTTAHQMARKCDDCCGGKGRGKCYGPQCLCR or GSMCMPCFTTDAQMARKCDDCCGGKGRGKCYGPQCLCR or GSMCMPCFTTDHAMARK or CDDCCGGKGRGKCYGPQCLCR; note = CONT. FROM ABOVE: GSMCMPCFTTDHQAARKCDDCCGGKGRGKCYGPQCLCR or GSMCMPCFTTDHQMAAKCDDCCGGKGRGKCYGPQCLCR or GSMCMPCFTTDHQMARACDDCCGGKGRGKCYGPQCLCR or GSMCMPCFTTDHQMARKCADCCGGKGRGKCYGPQCLCR or GSMC or MPCFTTDHQMARKCDACCGGKGRGKCYGPQCLCR or GSMCMPCFTTDHQMARKCDDCCAGKGRGKCYGPQCLCR or GSMCMPCFTTDHQMARKCDDCCGAKGRGKCYGPQCLCR or GSMCMPCFTTDHQMARKCDDCCGGAGRGKCYGPQCLCR or GSMCMPCFTTDHQMARKCDDCCGGKARGKCYGPQC or LCR or GSMCMPCFTTDHQMARKCDDCCGGKGAGKCYGPQCLCR or GSMCMPCFTTDHQMARKCDDCCGGKGRGACYGPQCLCR or GSMCMPCFTTDHQMARKCDDCCGGKGRGKCAGPQCLCR or GSMCMPCFTTDHQMARKCDDCCGGKGRGKCYAPQCLCR or GSMCMPCFTTDHQMARKCDDCC or GGKGRGKCYGAQCLCR or GSMCMPCFTTDHQMARKCDDCCGGKGRGKCYGPACLCR or GSMCMPCFTTDHQMARKCDDCCGGKGRGKCYGPQCACR or GSMCMPCFTTDHQMARKCDDCCGGKGRGKCYGPQCLCA or MCMPCFTTDHQMARKCDDCCGGKGRGKCYGPQCLCR or ACMPCFTTDHQ or MARKCDDCCGGKGRGKCYGPQCLCR or MCAPCFTTDHQMARKCDDCCGGKGRGKCYGPQCLCR or MCMACFTTDHQMARKCDDCCGGKGRGKCYGPQCLCR or MCMPCATTDHQMARKCDDCCGGKGRGKCYGPQCLCR or MCMPCFATDHQMARKCDDCCGGKGRGKCYGPQCLCR or MCMPCFTA; note = CONT. FROM ABOVE: DHQMARKCDDCCGGKGRGKCYGPQCLCR or MCMPCFTTAHQMARKCDDCCGGKGRGKCYGPQCLCR or MCMPCFTTDAQMARKCDDCCGGKGRGKCYGPQCLCR or MCMPCFTTDHAMARKCDDCCGGKGRGKCYGPQCLCR or MCMPCFTTDHQAARKCDDCCGGKGRGKCYGPQCLCR or MCMPC or FTTDHQMAAKCDDCCGGKGRGKCYGPQCLCR or MCMPCFTTDHQMARACDDCCGGKGRGKCYGPQCLCR or MCMPCFTTDHQMARKCADCCGGKGRGKCYGPQCLCR or MCMPCFTTDHQMARKCDACCGGKGRGKCYGPQCLCR or MCMPCFTTDHQMARKCDDCCAGKGRGKCYGPQCLCR or MC or MPCFTTDHQMARKCDDCCGAKGRGKCYGPQCLCR or MCMPCFTTDHQMARKCDDCCGGAGRGKCYGPQCLCR or MCMPCFTTDHQMARKCDDCCGGKARGKCYGPQCLCR or MCMPCFTTDHQMARKCDDCCGGKGAGKCYGPQCLCR or MCMPCFTTDHQMARKCDDCCGGKGRGACYGPQCLCR or MCMPCFTTDHQMARKCDDCCGGKGRGKCAGPQCLCR or MCMPCFTTDHQMARKCDDCCGGKGRGKCYAPQCLCR or MCMPCFTTDHQMARKCDDCCGGKGRGKCYGAQCLCR or MCMPCFTTDHQMARKCDDCCGGKGRGKCYGPACLCR or MCMPCFTTDHQMARKCDDCCGGKGRGKCYGPQCACR or MCMPCFTTDHQMARKCDDCCGGKGRGKCYGPQCLCA
  REGION 1..321: note = See specification as filed for detailed description of substitutions and preferred embodiments
METDTLLLWVLLLWVPGSTGXXXXXXXXXXXXXXXXXXXXXXXXXXXXXXXXXXXXXXXXXXXXXXXXXXXXXXXXXXXXXXXXXXXXXEPKSCDKTHTCPPCPAPELLGGPSVFLFPPKPKDTLMISRTPEVTCVVVDVSHEDPEVKFNWYVDGVEVHNAKTKPREEQYNSTYRVVSVLTVLHQDWLNGKEYKCKVSNKALPAPIEKTISKAKGQPREPQVYTLPPSRDELTKNQVSLTCLVKGFYPSDIAVEWESNGQPENNYKTTPPVLDSDGSFFLYSKLTVDKSRWQQGNVFSCSVMHEALHNHYTQKSLSLSPGK

SEQ ID NO: 1494 - protein, 292 aa, synthetic construct
  REGION 1..292: note = Description of Artificial Sequence: Synthetic polypeptide
METDTLLLWVLLLWVPGSTGGSGVPINVRCRGSRDCLDPCRRAGMRFGRCINSRCHCTPGGSGGSDKTHTCPPCPAPELLGGPSVFLFPPKPKDTLMISRTPEVTCVVVDVSHEDPEVKFNWYVDGVEVHNAKTKPREEQYNSTYRVVSVLTVLHQDWLNGKEYKCKVSNKALPAPIEKTISKAKGQPREPQVYTLPPSRDELTKNQVSLTCLVKGFYPSDIAVEWESNGQPENNYKTTPPVLDSDGSFFLYSKLTVDKSRWQQGNVFSCSVMHEALHNHYTQKSLSLSPGK

SEQ ID NO: 1495 - protein, 20 aa, synthetic construct
  REGION 1..20: note = Description of Artificial Sequence: Synthetic peptide
  VARIANT 1..20: note = MISC_FEATURE - This sequence may encompass 3-20 residues
RRRRRRRRRRRRRRRRRRRR

SEQ ID NO: 1496 - protein, 4 aa, synthetic construct
  REGION 1..4: note = Description of Artificial Sequence: Synthetic peptide
GAGA

SEQ ID NO: 1497 - protein, 4 aa, synthetic construct
  REGION 1..4: note = Description of Artificial Sequence: Synthetic peptide
GFLG

SEQ ID NO: 1498 - protein, 10 aa, synthetic construct
  REGION 1..10: note = Description of Artificial Sequence: Synthetic 10xHis tag
HHHHHHHHHH

SEQ ID NO: 1499 - protein, 6 aa, synthetic construct
  REGION 1..6: note = Description of Artificial Sequence: Synthetic peptide
PLGLAG

SEQ ID NO: 1500 - protein, 19 aa, synthetic construct
  REGION 1..19: note = Description of Artificial Sequence: Synthetic peptide
METDTLLLWVLLLWVPGST

SEQ ID NO: 1501 - protein, 211 aa, synthetic construct
  REGION 1..211: note = Description of Artificial Sequence: Synthetic polypeptide
ITCPPPMSVEHADIWVKSYSLYSRERYICNSGFKRKAGTSSLTECVLNKATNVAHWTTPSLKCIRDPALVHQRPAPPSGGSGGGGSGGGSGGGGSLQNWVNVISDLKKIEDLIQSMHIDATLYTESDVHPSCKVTAMKCFLLELQVISLESGDASIHDTVENLIILANNSLSSNGNVTESGCKECEELEEKNIKEFLQSFVHIVQMFINTS

SEQ ID NO: 1502 - protein, 211 aa, synthetic construct
  REGION 1..211: note = Description of Artificial Sequence: Synthetic polypeptide
ITCPPPMSVEHADIWVKSYSLYSRERYICNSGFKRKAGTSSLTECVLNKATNVAHWTTPSLKCIRDPALVHQRPAPPSGGSGGGGSGGGSGGGGSLQNWVNVISDLKKIEDLIQSMHIDATLYTESDVHPSCKVTAMKCFLLELQVISLESGDASIHDTVENLIILANDSLSSNGNVTESGCKECEELEEKNIKEFLQSFVHIVQMFINTS

SEQ ID NO: 1503 - protein, 339 aa, synthetic construct
  REGION 1..339: note = Description of Artificial Sequence: Synthetic polypeptide
  VARIANT 254..303: note = MOD_RES - This region may encompass one of the following sequences: VA or VK or VR or V-Cit or FK or MK or NK or IP or GI or GL or GY or GM or MI or AI or PI or GPQGIAGQ or GPQGIFGQ or GPQGIWGQ or GPQG or ILGQ or GPQGIRGQ or GPLGIAGQ or GPMGIAGQ or GPYGIAGQ or DYKDDDDKIEGR or GGSGGG GSGGGSGGGGSLQ or GGSGGGGSGGGSGGGGS or SGGGSGGGGSG GGGSGGGGSGGGSLQ or SGGGSGGGGSGGGGSGGGGSGGGS or GG or GGSGGGGSGGGGSGGGGSGGGGSGGGGSGGGGSGGGG SGGGGSGGGGS, this region may encompass 1-10 GGGGS repeating units or GS or SGGSGGGGSGGGSGGGGSLQ or GGGS or GGGSGGGS or GGGSGGGSGGGS or GGGSGGGSGGGSGGGSGGGSGGGSGGGS, this region may encompass 1-10 GGGS repeating units or GSVAGS or GGGGSVAGGGGS or GGGGSGGGGSVAGGGGSGGGG S or GGGGSGGGGSPLGLAGGGGGSGGGGS or AEAAAKEAAAKAVAAEAAAKEAAAKA
  VARIANT 254..303: note = MOD_RES - Any amino acid or absent
  REGION 1..339: note = See specification as filed for detailed description of substitutions and preferred embodiments
MAPRRARGCRTLGLPALLLLLLLRPPATRGDYKDDDDKIEGRITCPPPMSVEHADIWVKSYSLYSRERYICNSGFKRKAGTSSLTECVLNKATNVAHWTTPSLKCIRDPALVHQRPAPPSGGSGGGGSGGGSGGGGSLQNWVNVISDLKKIEDLIQSMHIDATLYTESDVHPSCKVTAMKCFLLELQVISLESGDASIHDTVENLIILANNSLSSNGNVTESGCKECEELEEKNIKEFLQSFVHIVQMFINTSXXXXXXXXXXXXXXXXXXXXXXXXXXXXXXXXXXXXXXXXXXXXXXXXXXMCMPCFTTDHQMARKCDDCCGGKGRGKCYGPQCLCR

SEQ ID NO: 1504 - protein, 339 aa, synthetic construct; identical to SEQ ID NO: 1503
  REGION 1..339: note = Description of Artificial Sequence: Synthetic polypeptide
  VARIANT 254..303: note = MOD_RES - Any amino acid or absent

SEQ ID NO: 1505 - protein, 33 aa, synthetic construct
  REGION 1..33: note = Description of Artificial Sequence: Synthetic polypeptide
GDCLPHLKLCKENKDCCSKKCKRRGTNIEKRCR

SEQ ID NO: 1506 - protein, 33 aa, synthetic construct
  REGION 1..33: note = Description of Artificial Sequence: Synthetic polypeptide
GDCLPHLKRCKADNDCCGKKCKRRGTNAEKRCR

SEQ ID NO: 1507 - protein, 35 aa, synthetic construct
  REGION 1..35: note = Description of Artificial Sequence: Synthetic polypeptide
SEKDCIKHLQRCRENKDCCSKKCSRRGTNPEKRCR

SEQ ID NO: 1508 - protein, 45 aa, synthetic construct
  REGION 1..45: note = Description of Artificial Sequence: Synthetic polypeptide
TDDEEARWIEKRGDCLPHLKLCKADKDCCSKKCKRRGTNPEKRCR

SEQ ID NO: 1509 - protein, 33 aa, synthetic construct
  REGION 1..33: note = Description of Artificial Sequence: Synthetic polypeptide
GDCLPHLKRCKENNDCCSKKCKRRGTNPEKRCR

SEQ ID NO: 1510 - protein, 33 aa, synthetic construct
  REGION 1..33: note = Description of Artificial Sequence: Synthetic polypeptide
GDCLPHLKRCKENNDCCSKKCKRRGANPEKRCR

SEQ ID NO: 1511 - protein, 44 aa, synthetic construct
  REGION 1..44: note = Description of Artificial Sequence: Synthetic polypeptide
CGAQTQRIRCRVPCNWKKEFGADCKYKFENWGACDGGTGTKVRQ

SEQ ID NO: 1512 - protein, 34 aa, synthetic construct
  REGION 1..34: note = Description of Artificial Sequence: Synthetic polypeptide
SGSDGGVCPKILKKCRRDSDCPGACICRGNGYCG

SEQ ID NO: 1513 - DNA, 70 bp, synthetic construct
  misc_feature 1..70: note = Description of Artificial Sequence: Synthetic oligonucleotide
  source 1..70: mol_type = other DNA
cagacgggcacacactacttgaagcactcaaggcaagctttattgaggcttaagcagtgggttccctagt

SEQ ID NO: 1514 - DNA, 62 bp, synthetic construct
  misc_feature 1..62: note = Description of Artificial Sequence: Synthetic oligonucleotide
  source 1..62: mol_type = other DNA
caggggggaccactcttaagcctcaaggcaagctttgttgaggcttaagagtggtcccgggt

SEQ ID NO: 1515 - DNA, 70 bp, synthetic construct
  misc_feature 1..70: note = Description of Artificial Sequence: Synthetic oligonucleotide
  source 1..70: mol_type = other DNA
caggggggcacacactacttgaagcactcaaggcaagctttgttgaggcttaagcagtgggttcccgggt

SEQ ID NO: 1516 - RNA, 28 nt, synthetic construct
  misc_feature 1..28: note = Description of Artificial Sequence: Synthetic oligonucleotide
  source 1..28: mol_type = other RNA
gggaggtcagctactttcatgttgctga

SEQ ID NO: 1517 - RNA, 80 nt, Influenza A virus
  source 1..80: mol_type = unassigned RNA
agtagaaacaagggtatttttctttaattgtcgtactccttgatgtcactcagtgagtgattatctaccctgcttttgct

SEQ ID NO: 1518 - RNA, 70 nt, Influenza A virus
  source 1..70: mol_type = unassigned RNA
accaaacaaagatttggtgaatgacgagactacacgccttttatcgtaactcaccgattctctgtttggt
